(19) United States
(12) Patent Application Publication
(10) Pub. No.: US 2013/0095097 A1
(43) Pub. Date: Apr. 18, 2013

(54) Polypeptide Heterodimers and Uses Thereof

(71) Applicants: John W. Blankenship, Seattle, WA (US); Philip Tan, Edmonds, WA (US)

(72) Inventors: John W. Blankenship, Seattle, WA (US); Philip Tan, Edmonds, WA (US)

(73) Assignee: Emergent Product Development Seattle, LLC, Seattle, WA (US)

(21) Appl. No.: 13/519,740

(22) PCT Filed: Dec. 29, 2010
(86) PCT No.: PCT/US2010/062404

§ 371 Date: Jun. 28, 2012

Related U.S. Application Data
(60) Provisional application No. 61/290,840, filed on Dec. 29, 2009.
(60) Provisional application No. 61/365,266, filed on Jul. 16, 2010.
(60) Provisional application No. 61/366,743, filed on Jul. 22, 2010.

(51) Int. Cl. C07K 16/46

(52) U.S. Cl. CPC C07K 16/46
USPC 424/133.1; 530/387.3; 435/320.1; 435/328; 435/69.6

(57) ABSTRACT

The present disclosure provides polypeptide heterodimers formed between two different single chain fusion polypeptides via natural heterodimerization of an immunoglobulin CH1 region and an immunoglobulin light chain constant region (CL). One chain of a heterodimer comprises a binding domain that specifically binds a target (e.g., a receptor). In addition, both chains of a heterodimer further comprise an Fc region portion. The present disclosure also provides nucleic acids, vectors, host cells and methods for making polypeptide heterodimers as well as methods for using such polypeptide heterodimers, such as in reducing T cell activation, inhibiting solid malignancy growth, and treating autoimmune or inflammatory conditions.

### CROSS-REFERENCE(S) TO RELATED APPLICATION(S)

[0001] This application claims the benefit under 35 U.S.C. §119(e) of U.S. Provisional Patent Application No. 61/366,743, filed Jul. 22, 2010, which is herein incorporated by reference in its entirety.

### STATEMENT REGARDING SEQUENCE LISTING

[0002] The Sequence Listing associated with this application is provided in text format in lieu of a paper copy, and is hereby incorporated by reference into the specification. The name of the text file containing the Sequence Listing is 910180_{—}419PC SEQUENCE_LISTING.txt. The text file is 667 KB, was created on Dec. 29, 2010, and is being submitted electronically via EFS-Web, concurrent with the filing of the specification.

### BACKGROUND

[0003] 1. Technical Field

[0004] The present disclosure generally provides polypeptide heterodimers, compositions thereof, and methods for making and using such polypeptide heterodimers. More specifically, the polypeptide heterodimers provided herein are formed, in part, via natural heterodimerization between an immunoglobulin CH1 region and an immunoglobulin light chain constant region (CL). In addition, one single chain polypeptide of the polypeptide heterodimers provided herein comprises a binding domain that specifically binds a target. Furthermore, both single chain polypeptides of the polypeptide heterodimers provided herein each comprise an Fc region portion (e.g., immunoglobulin CH2 and CH3 domains).

[0005] 2. Description of the Related Art

[0006] The process of signal transduction often involves receptor proteins that have extracellular domains, transmembrane domains, and intracellular domains. During ligand binding, receptor molecules often oligomerize or multimerize (also referred to as “cross-link”) to transmit effectively the signal to the intracellular component of the cell. The stimulation or blockade of the interaction between a receptor and a ligand or the subsequent oligomerization or multimerization of receptors has important therapeutic implications for a wide variety of diseases.

[0007] Molecules useful in modulating receptor and ligand interactions include antibodies or molecules derived from antibodies. For instance, an antibody or its derivative may function as a receptor antagonist that binds to a cell surface receptor and inactivates it by blocking the binding site of an activating ligand or preventing receptor dimerization or multimerization required for activation.

[0008] An example of an antibody derivative functioning as a receptor antagonist is Genmab UNIBODY®. UNIBODY® is a half-molecule of conventional IgG. It consists of one heavy and one light IgG chain only by deleting the core hinge region of human IgG4. UNIBODY® molecules bind only one antigen molecule and preclude cross-linking of antigen molecules. However, UNIBODY® molecules have no cytolytic function, such as the antibody-dependent cell-mediated cytotoxicity (ADCC) and complement dependent-cytotoxicity (CDC), and thus may be ineffective for treating certain diseases.

[0009] Another example of an antibody derivative functioning as a receptor antagonist is Genentech's one armed monoclonal antibodies developed using so called “knobs into holes” engineering of antibody CH3 domains. Although such molecules may retain Fc activities, they require at least three polypeptide chains. Coexpression of multiple polypeptide chains in a recombinant cell generally results in a mixture of both homodimers and heterodimers. The costs associated with recovery and purification of heterodimers from the mixture has limited the commercial application of this technology.

[0010] Accordingly, there remains a need in the art for alternative polypeptide heterodimers and efficient methods for producing the same.

### BRIEF SUMMARY

[0011] The present disclosure provides polypeptide heterodimers formed between two different single chain polypeptides via natural heterodimerization of an immunoglobulin CH1 region and an immunoglobulin light chain constant region (CL). The present disclosure also provides nucleic acids, vectors, host cells and methods for making polypeptide heterodimers as well as methods for using such polypeptide heterodimers, such as in reducing T cell activation, inhibiting solid malignancy growth, and treating autoimmune or inflammatory conditions.

[0012] In one aspect, the present disclosure provides a polypeptide heterodimer that comprises (a) a first single chain polypeptide comprising a binding domain that specifically binds a target, a hinge, a first immunoglobulin heterodimerization domain, and an Fc region portion; and (b) a second single chain polypeptide comprising a hinge, a second immunoglobulin heterodimerization domain that is not the same as the first immunoglobulin heterodimerization domain of the first single chain polypeptide, and an Fc region portion; wherein the first and second immunoglobulin heterodimerization domains associate with each other to form a polypeptide heterodimer comprised of the first and the second single chain polypeptides, and (i) the first immunoglobulin heterodimerization domain comprises a first immunoglobulin CH1 region and the second immunoglobulin heterodimerization domain comprises a first immunoglobulin CL region, or (ii) the first immunoglobulin heterodimerization domain comprises a first immunoglobulin CL region and the second immunoglobulin heterodimerization domain comprises a first immunoglobulin CH1 region, and wherein the Fc region portion comprises an immunoglobulin CH2 domain and CH3 domain of IgG1, IgG2, IgG3, IgG4, IgA1, IgA2, IgD, or any combination thereof; an immunoglobulin CH3 domain of IgG1, IgG2, IgG3, IgG4, IgA1, IgA2, IgD, IgE, IgM, or any combination thereof, an immunoglobulin CH3CH4 domain of IgE, IgM, or a combination thereof

[0013] In certain embodiments, the binding domain of the polypeptide heterodimer is a single chain Fv (scFv).

[0014] In certain embodiments, the binding domain is amino terminal to the Fc region portion. In certain other embodiments, the binding domain is carboxyl terminal to the Fc region portion.

[0015] In certain embodiments, the binding domain specifically binds to c-Met, RON, CD3, CEACAM6, EGFR, ErbB3, ErbB4, EphA2, GITR, IGF1R, GHRHR, GHR, FLT1, KDR, FLT4, CD44v6, CD151, TGFBR2, TGFBR1, IL6R, gp130, TNFR1, TNFR2, PD1, PD-L1, PD-L2, BTLA, HVEM, RANK, TNFRSF4, CD40, CD137, TWEAK-R, LTβR, LIFRβ, OSMRβ, TCRα, TCRβ, CD19, CD28, CD80, CD81, CD86, TLR7, TLR9, PTCH1, LRP5, Frizzled-1, or Robo1.

[0016] In certain embodiments, the first immunoglobulin heterodimerization domain comprises the first immunoglobulin CH1 region and the second immunoglobulin heterodimerization domain comprises the first immunoglobulin CL region. The first CH1 region may be amino terminal to the Fc region portion of the first single chain polypeptide, and the first CL region may be amino terminal to the Fc region portion of the second single chain polypeptide. Alternatively, the first CH1 region may be carboxyl terminal to the Fc region portion in the first single chain polypeptide, and the first CL region may be carboxyl terminal to the Fc region portion in the second single chain polypeptide.

[0017] In certain embodiments in which the first immunoglobulin heterodimerization domain comprises the first immunoglobulin CH1 region and the second immunoglobulin heterodimerization domain comprises the first immunoglobulin CL region, the first single chain polypeptide may further comprise a second CH1 region, the second single chain polypeptide may further comprise a second CL region, and the second CH1 region of the first single chain polypeptide and the second CL region of the second single chain polypeptide associate with each other in the polypeptide heterodimer. For example, in one embodiment, the Fc region portion of the first single chain polypeptide is disposed between the first and second CH1 regions, and the Fc region portion of the second single chain polypeptide is disposed between the first and second CL regions. In another embodiment, both the first and second CH1 regions are amino terminal to the Fc region portion in the first single chain polypeptide, and both the first and second CL regions are amino terminal to the Fc region portion in the second single chain polypeptide. In yet another embodiment, both the first and second CH1 regions are carboxyl terminal to the Fc region portion in the first single chain polypeptide, and both the first and second CL regions are carboxyl terminal to the Fc region portion in the second single chain polypeptide.

[0018] In certain other embodiments in which the first immunoglobulin heterodimerization domain comprises the first immunoglobulin CH1 region and the second immunoglobulin heterodimerization domain comprises the first immunoglobulin CL region, the first single chain polypeptide may further comprise a second CL region, the second single chain polypeptide may further comprises a second CH1 region, and the second CL region of the first single chain polypeptide and the second CH1 region of the second single chain polypeptide associate with each other in the polypeptide heterodimer. In one embodiment, in the first single chain polypeptide, the first CH1 region is amino terminal to the Fc region portion, and the second CL region is carboxyl terminal to the Fc region portion; and in the second single chain polypeptide, the first CL region is amino terminal to the Fc region portion, and the second CH1 region is carboxyl terminal to the Fc region portion. In another embodiment, in the first single chain polypeptide, the first CH1 region is carboxyl terminal to the Fc region portion, and the second CL region is amino terminal to the Fc region portion; and in the second single chain polypeptide, the first CL region is carboxyl terminal to the Fc region portion, and the second CH1 region is amino terminal to the Fc region portion. In another embodiment, in the first single chain polypeptide, both the first CH1 region and the second CL regions are amino terminal to the Fc region portion, and the first CH1 region is amino terminal to the second CL region; and in the second single chain polypeptide, both the first CL region and the second CH1 region are amino terminal to the Fc region portion, and the first CL region is amino terminal to the second CH1 region. In another embodiment, in the first single chain polypeptide, both the first CH1 region and the second CL regions are amino terminal to the Fc region portion, and the second CL region is amino terminal to the first CH1 region; and in the second single chain polypeptide, both the first CL region and the second CH1 region are amino terminal to the Fc region portion, and the second CH1 region is amino terminal to the first CL region. In another embodiment, in the first single chain polypeptide, both the first CH1 region and the second CL regions are carboxyl terminal to the Fc region portion, and the first CH1 region is amino terminal to the second CL region; and in the second single chain polypeptide, both the first CL region and the second CH1 region are carboxyl terminal to the Fc region portion, and the first CL region is amino terminal to the second CH1 region. In another embodiment, in the first single chain polypeptide, both the first CH1 region and the second CL regions are carboxyl terminal to the Fc region portion, and the second CL region is amino terminal to the first CH1 region; and in the second single chain polypeptide, both the first CL region and the second CH1 region are carboxyl terminal to the Fc region portion, and the second CH1 region is amino terminal to the first CL region.

[0019] In certain embodiments, the first immunoglobulin heterodimerization domain comprises a first immunoglobulin CL region and the second immunoglobulin heterodimerization domain comprises a first immunoglobulin CH1 region. The first CL region may be amino terminal to the Fc region portion of the first single chain polypeptide, and the first CH1 region may be amino terminal to the Fc region portion of the second single chain polypeptide. Alternatively, the first CL region may be carboxyl terminal to the Fc region portion in the first single chain polypeptide, and the first CH1 region may be carboxyl terminal to the Fc region portion in the second single chain polypeptide.

[0020] In certain embodiments in which the first immunoglobulin heterodimerization domain comprises a first immunoglobulin CL region and the second immunoglobulin heterodimerization domain comprises a first immunoglobulin CH1 region, the first single chain polypeptide may further comprise a second CL region, the second single chain polypeptide may further comprise a second CH1 region, and the second CL region of the first single chain polypeptide and the second CH1 region of the second single chain polypeptide associate with each other in the polypeptide heterodimer. In one embodiment, the Fc region portion of the first single chain polypeptide is disposed between the first and second CL regions, and wherein the Fc region portion of the second single chain polypeptide is disposed between the first and second CH1 regions. In another embodiment, both the first and second CL regions are amino terminal to the Fc region portion in the first single chain polypeptide, and both the first and second CH1 regions are amino terminal to the Fc region portion in the second single chain polypeptide. In yet another embodiment, both the first and second CL regions are carboxyl terminal to the Fc region portion in the first single chain polypeptide, and both the first and second CH1 regions are carboxyl terminal to the Fc region portion portion in the second single chain polypeptide.

[0021] In certain embodiments, the first CL region is a Cκ region. In certain other embodiments, the first CL region is a Cλ region.

[0022] In certain embodiments, the second CL region is a Cκregion. In certain other embodiments, the second CL region is a Cλ region.

[0023] In certain embodiments, the Cκ region is a wild type human immunoglobulin Cκ region.

[0024] In certain embodiments, the Cκ region is an altered human immunoglobulin Cκ region in which one or more amino acids of a wild type human Cκ region are substituted at N29, N30, Q52, V55, T56, T56, S68, or T70. For example, the one or more amino acid substitutions are selected from Ala (A), Arg (R), Trp (W), Tyr (Y), Glu (E), Gln (Q), Lys (K), Asp (D), Met (M), Ser (S), and Phe (F).

[0025] In certain embodiments, the Cκ region is an altered human immunoglobulin Ck region with the cysteine residue of a wild type human Cκ region that is involved in forming a disulfide bond with a wild type human immunoglobulin CH1 region is deleted or substituted.

[0026] In certain embodiments, the Ck region is selected from polypeptides comprising SEQ ID NOS:141-178 and 202.

[0027] In certain embodiments, the Cλ region is a wild type human immunoglobulin Cλ region.

[0028] In certain embodiments, the Cλ region is an altered human immunoglobulin Cλ region with the cysteine residue of a wild type human Cλ region that is involved in forming a disulfide bond with a wild type human immunoglobulin CH1 region is deleted or substituted.

[0029] In certain embodiments, the Cλ region is a polypeptide comprising SEQ ID NO:140.

[0030] In certain embodiments, the first CH1 region or the second CH1 region when present is a wild type human immunoglobulin CH1 region. In certain other embodiments, the first CH1 region or the second CH1 region when present is an altered human immunoglobulin CH1 region with the cysteine of a wild type human immunoglobulin CH1 region that is involved in forming a disulfide bond with a wild type human immunoglobulin CL region is deleted or substituted.

[0031] In certain embodiments, the first CH1 region and the second CH1 region when present is a polypeptide comprising SEQ ID NO:114.

[0032] In certain embodiments, the CH1 region is an altered human immunoglobulin CH1 region comprising an amino acid substitution by which Val (V) at position 68 is substituted by Lys (K), Arg (R) or His (H), and wherein the Ck region is an altered human immunoglobulin Ck region comprising an amino acid substitution by which Leu (L) at position 29 is substituted by Asp (D) or Glu (E). In certain other embodiments, the CH1 region is an altered human immunoglobulin CH1 region comprising an amino acid substitution by which Val (V) at position 68 is changed to Asp (D) or Glu (E), and wherein the Ck region is an altered human immunoglobulin Ck region comprising an amino acid substitution by which Leu (L) at position 29 is changed to Lys (K), Arg (R) or His (H).

[0033] In certain embodiments, the Fc region portion comprises an immunoglobulin CH2 domain, such as an IgG1 CH2 domain or an IgG2, IgG3, IgG4, IgA1, IgA2, or IgD CH2 domain.

[0034] In certain embodiments, the Fc region portion comprises an immunoglobulin CH3 domain, such as an IgG1 CH3 domain or an IgG2, IgG3, IgG4, IgA1, IgA2, IgD, IgE or IgM CH3 domain.

[0035] In certain embodiments, the Fc region portion comprises an immunoglobulin CH2 domain and an immunoglobulin CH3 domain, such as IgG1, IgG2, IgG3, IgG4, IgA1, IgA2, or IgD CH2 and CH3 domains.

[0036] In certain embodiments, the Fc region portion comprises an immunoglobulin CH2 domain and an immunoglobulin CH3 domain, the immunoglobulin CH3 domain is linked to the CH1 domain immediately carboxyl terminal to the immunoglobulin CH3 domain in one single chain polypeptide via a peptide comprising SEQ ID NO:787, 788, 789 or 790, and the immunoglobulin CH3 domain is linked to the CL domain immediately carboxyl terminal to the immunoglobulin CH3 domain in the other single chain polypeptide via a peptide comprising SEQ ID NO:787, 791, 792, or 793.

[0037] In certain embodiments, the Fc region portion comprises IgM or IgE CH3 and CH4 domains.

[0038] In certain embodiments, the CH2 domain is an altered human IgG1, IgG2, IgG3, or IgG4 CH2 domain that comprises an amino acid substitution at position 297 and at least one additional substitution or deletion at positions 234 to 238. In certain other embodiments, the CH2 domain is an altered human IgG1, IgG2, IgG3, or IgG4 CH2 domain that comprises one or more amino acid mutations at positions 234-238, 255, 256, 257, 258, 290, 297, 318, 320, 322, 331, and 339. In certain other embodiments, the CH2 domain is an altered human IgG1, IgG2, IgG3, or IgG4 CH2 domain that comprises one or more amino acid mutations at positions 234, 235, 237, 318, 320 and 322.

[0039] In certain embodiments, the CH3 domain is an altered human IgG1, IgG2, IgG3, or IgG4 molecule that comprises an amino acid substitution or deletion at position 405 or 407.

[0040] In certain embodiments, the hinge of both the first and second single chain polypeptides is an immunoglobulin hinge region, such as an IgG1, IgG2, IgG3, IgG4, IgA1, IgA2, IgD, or IgE hinge.

[0041] In certain embodiments, the immunoglobulin hinge is a wild type immunoglobulin hinge. In certain other embodiments, the immunoglobulin hinge is an altered immunoglobulin hinge, such as those set forth in SEQ ID NOS:229-240.

[0042] In certain embodiments, the immunoglobulin hinge region is present at the amino terminal to the Fc region portion. In certain embodiments, the immunoglobulin hinge region is disposed between the binding domain and the immunoglobulin heterodimerization domain. In certain embodiments, the immunoglobulin hinge region is disposed between the immunoglobulin heterodimerization domain and the Fc region portion.

[0043] In certain embodiments, at least one of the first and second single chain polypeptide hinges is a C type lectin hinge region, such as a NKG2A or NKG2D peptide, or a derivative thereof.

[0044] In certain embodiments, the hinges of the first and second single chain polypeptides are identical. In certain other embodiments, the hinges of the first and second single chain polypeptides are different.

[0045] In certain embodiments, the first single chain polypeptide comprises amino acids 21-609 of SEQ ID NO:26, and the second single chain polypeptide comprises amino acids 21-363 of SEQ ID NO:137; the first single chain polypeptide comprises amino acids 21-716 of SEQ ID NO:46, and the second single chain polypeptide comprises amino acids 21-461 of SEQ ID NO:48; the first single chain polypeptide comprises amino acids 21-716 of SEQ ID NO:46 and the second single chain polypeptide comprises amino acids 21-461 of SEQ ID NO:64, the first single chain polypeptide comprises amino acids 21-716 of SEQ ID NO:62, and the second single chain polypeptide comprises amino acids 21-461 of SEQ ID NO:48; or the first single chain polypeptide comprises amino acids 21-716 of SEQ ID NO:62, and the second single chain polypeptide comprises amino acids 21-461 of SEQ ID NO:64; the first single chain polypeptide comprises SEQ ID NO:139, and the second single chain polypeptide comprises amino acids of 21-461 of SEQ ID NO:48; the first single chain polypeptide comprises SEQ ID NO:263, and the second single chain polypeptide comprises amino acids of 21-461 of SEQ ID NO:48; the first single chain polypeptide comprises SEQ ID NO:267, and the second single chain polypeptide comprises amino acids of 21-461 of SEQ ID NO:48, the first single chain polypeptide comprises SEQ ID

[0046] NO:769, and the second single chain polypeptide comprises SEQ ID NO:765; the first single chain polypeptide comprises SEQ ID NO:769, and the second single chain polypeptide comprises SEQ ID NO:766; the first single chain polypeptide comprises SEQ ID NO:769, and the second single chain polypeptide comprises SEQ ID NO:767; the first single chain polypeptide comprises SEQ ID NO:769, and the second single chain polypeptide comprises SEQ ID NO:768; the first single chain polypeptide comprises SEQ ID NO:781, and the second single chain polypeptide comprises SEQ ID

[0047] NO:778; and the first single chain polypeptide comprises SEQ ID NO:780; and the second single chain polypeptide comprises SEQ ID NO:779.

[0048] In certain embodiments, the first single chain polypeptide comprises amino acids 21-609 of SEQ ID NO:22, and the second single chain polypeptide comprises SEQ ID NO:91, 92, 193, 98, 99, 101, or 103, or amino acids 21-361 of SEQ ID NO:129, 131 or 133.

[0049] In certain embodiments, the first single chain polypeptide comprises amino acids 21-595 of SEQ ID NO:135, and the second single chain polypeptide comprises amino acids 21-361 of SEQ ID NO:24, 133 or 131.

[0050] In another aspect, the present disclosure provides a composition that comprises polypeptide heterodimers provided herein and a pharmaceutically acceptable excipient.

[0051] In another aspect, the present disclosure provides expression vectors capable of expressing the polypeptide heterodimers provided herein.

[0052] In another aspect, the present disclosure provides a host cell that comprises the expression vector capable of expressing the polypeptide heterodimers provided herein.

[0053] In a related aspect, the present disclosure provides a host cell that comprises first and second expression vectors capable of expressing the first and second single chain polypeptides, respectively, of the polypeptide heterodimers provided herein.

[0054] In another aspect, the present disclosure provides methods for making a polypeptide heterodimer, comprising (a) culturing host cells provided herein under conditions suitable to express two different single chain polypeptides, and (b) optionally isolating or purifying the heterodimers formed from the first and second single chain polypeptides from the culture.

[0055] In another aspect, the present disclosure provides methods for reducing T cell activation, comprising administering to a patient in need thereof an effective amount of a polypeptide heterodimer as provided herein, wherein the binding domain of the polypeptide heterodimer specifically binds CD28.

[0056] In another aspect, the present disclosure provides methods for inhibiting growth of a solid malignancy, comprising administering to a patient in need thereof an effective amount of a polypeptide heterodimer provided herein, wherein the binding domain of the polypeptide heterodimer specifically binds EGFR, ErbB3, ErbB4, c-Met, RON, CEACAM6, EphA2, IGF1R, GHRHR, GHR, VEGFR1, VEGFR2, VEGFR3, CD44v6, CD151, TGFBR2, IL6R, gp130, TNFR2, PD1, TWEAK-R, OSMRbeta, Patched-1, Frizzled, or Robo1. In certain embodiments, the method further comprises administering to a patient in need thereof a chemotherapeutic agent or ionizing radiation.

[0057] In another aspect, the present disclosure provides methods for treating an autoimmune or inflammatory condition, comprising administering to a patient in need thereof an effective amount of a polypeptide heterodimer provided herein, wherein the binding domain of the polypeptide heterodimer specifically binds TGFBR2, TGFBR1, IL6R, gp130, TNFR1, TNFR2, PD1, HVEM, OX40, CD40, CD137, TWEAK-R, LTbetaR, LIFRbeta, OSMRbeta, CD3, TCRalpha, TCRbeta, CD19, CD28, CD80, CD81, CD86, TLR7, or TLR9.

[0058] In certain embodiments, the methods for using the polypeptide heterodimers provided herein may further comprise administering to a patient in need thereof a second active agent, such as a second polypeptide heterodimer, or a monoclonal antibody, or an immunoglobulin-derived fusion protein.

### BRIEF DESCRIPTION OF THE DRAWINGS

[0059] FIGS. 1A and 1B show a schematic of (A) a class 1 polypeptide heterodimer (Interceptor) (i.e., having a binding domain at the amino terminus) and (B) a class 2 Interceptor (i.e., having a binding domain at the carboxyl terminus), as described in Example 1.

[0060] FIGS. 2A-2C show a schematic of various exemplary class 1 Interceptors, including (A) one having a CH1-Cκ pair at the amino terminus (X0124), (B) one having a CH1-Cκ pair at the carboxyl terminus (X0126), and (C) one having a CH1-Cκ pair at the amino terminus and another CH1-Cκ pair at the carboxyl terminus (X0128).

[0061] FIG. 3 shows that when X0124 was expressed by co-transfecting X0112 and X0113, wherein only the heterodimer and homodimer of the light chain were expressed. “NR” stands for “Non-Reduced,” and “R” stands for “Reduced.”

[0062] FIG. 4 shows analysis of X0124 by mass spectrometry, indicating that the light chain homodimer and heterodimer were expressed at approximately 1:1 ratio with no evidence of the presence of the heavy chain homodimer.

[0063] FIG. 5 shows that when X0126 was expressed by co-transfecting X0114 and X0115, wherein only the heterodimer and homodimer of the light chain were expressed. “NR” stands for “Non-Reduced,” and “R” stands for “Reduced.”

[0064] FIG. 6 shows that when X0128 was expressed by co-transfecting X0120 and X0121, wherein only the heterodimer and homodimer of the light chain were expressed. “NR” stands for “Non-Reduced,” and “R” stands for “Reduced.”

[0065] FIG. 7A shows that when X0125 was expressed by co-transfecting X0116 and X0117, wherein in addition to heterodimer and homodimer of the light chain, monomers of the light and heavy chains were expressed. “NR” stands for “Non-Reduced,” and “R” stands for “Reduced.”

[0066] FIG. 7B shows that when X0127 was expressed by co-transfecting X0119 and X0118, wherein in addition to heterodimer and homodimer of the light chain, monomers of the light and heavy chains were also expressed. “NR” stands for “Non-Reduced,” and “R” stands for “Reduced.”

[0067] FIG. 8A shows that when X0138 was expressed by co-transfecting X0137 and X0136, wherein in addition to heterodimer and homodimer of the light chain, monomer of the light chain was also expressed. “NR” stands for “Non-Reduced,” and “R” stands for “Reduced.”

[0068] FIG. 8B shows that when X0141 was expressed by co-transfecting X0140 and X0139, wherein in addition to heterodimer and homodimer of the light chain, monomer of the light chain was also expressed.

[0069] FIG. 9 shows ELISA results in which a plate coated with CD28 mIg was contacted with Interceptors specific for CD28 (X0124, X0125, X0126, X0127, X0128, and X0129), an anti-CD28 SMIP protein (M0039), or the negative control of a homodimer of light chain X0113, and then binding was detected with anti-human IgG HRP.

[0070] FIG. 10 shows ELISA results in which a plate coated with CD28 mIg was contacted with Interceptors specific for CD28 (X00124, X0125, X0126, X0127, X0128, and X0129), an anti-CD28 SMIP protein (M0039), or the negative control of a homodimer of light chain X0113, and then binding was detected with anti-human Cκ HRP.

[0071] FIG. 11 shows cation exchange chromatography used to separate the heterodimer X0124 from the homodimer of the light chain.

[0072] FIG. 12 is SDS-PAGE analysis of X0124 that shows a higher heterodimer content after repurification with the cation exchange column. “NR” stands for “Non-Reduced,” and “R” stands for “Reduced.”

[0073] FIG. 13 is SDS-PAGE analysis of X0124 and X0126 Interceptors before and after protein L purification, showing that greater than 95% heterodimer was obtained after the second step protein L purification. “NR” stands for “Non-Reduced,” and “Red” stands for “Reduced.”

[0074] FIG. 14A is a schematic of X0142 in which Cκ of X0124 was replaced with a Cλ.

[0075] FIG. 14B is a schematic of X0143 in which Cκ of X0126 was replaced with a Cλ.

[0076] FIG. 15 shows SDS-PAGE results of X0142 and X0143, showing both heterodimer and light chain homodimer are formed when a Cλ heterodimerization domain is used in place of Cκ. “NR” stands for “Non-Reduced,” and “Red” stands for “Reduced.”

[0077] FIG. 16 shows a schematic representation of expression of X0130 alone, expression of X0131 alone, and co-expression of X0130 (long chain) and X0131 (short chain) that produced X0132. Expression of X0130 alone yielded no protein and expression of X0131 yielded little protein, whereas co-expression of X0130 and X0131 (especially at a 2:1 ratio) yielded pure heterodimer.

[0078] FIG. 17 shows SDS-PAGE results of X0132 using 1:1 X0130 (long) and X0131 (short) ratio or 2:1 X0130 and X0131 ratio for transfection.

[0079] FIG. 18 shows the mass spectra of X0132, which demonstrates that 100% heterodimer is formed.

[0080] FIG. 19 shows schematic representations of exemplary Interceptors with two pairs of Cκ/Cλ-CH1 combinations, X0132, X0166, X0165 and X0149.

[0081] FIG. 20 shows SDS-PAGE results of Interceptors X0132, X0166, X0165 and X0149 with Cκ-Ch1 and Cλ-CH1 combinations, demonstrating that heterodimers were greater than 90% pure.

[0082] FIG. 21 shows SEC results of Interceptors X0132, X0165, X0166 and X0145 with different Cκ-CH1 and Cλ-CH1 combinations.

[0083] FIG. 22 shows binding of selected Interceptors (X0124, X0128 and X0132) on Jurkat T cell lines.

[0084] FIG. 23 shows that anti-CD28 in different molecular formats blocked primary MLR.

[0085] FIG. 24 shows that Interceptors block secondary MLR.

[0086] FIG. 25 shows that bivalent anti-CD28 molecules (SMIP and 2E12 Mab), but not Interceptors, synergize with a suboptimal concentration of PMA in stimulating purified human T cells.

[0087] FIGS. 26A-26D show direct binding to immobilized CD28 by (A) 2E12 antibody fragment (Fab), (B) 2E12 single-chain variable fragment (scFv), and 2E12 heterodimeric monovalent polypeptides (C) X0124 and (D) X0132, with response units (Ru) plotted against time.

[0088] FIGS. 27A-27B show binding of bivalent 2E12 binding polypeptides. 1:1 binding of directly immobilized CD28 by 2E12 monoclonal antibody (mAb) (FIG. 27A), and 2E12 SMIP protein (M0039) (FIG. 27B), with response units (Ru) plotted against time (top).

[0089] FIG. 28 shows SDS-PAGE results of X0171. “NR” stands for “Non-Reduced,” and “Red” stands for “Reduced.”

[0090] FIG. 29 shows a mass spectrum of Interceptor X0171 that demonstrates that the heterodimer is the predominant species.

[0091] FIG. 30 shows cation exchange chromatography of homodimer/heterodimer mixtures obtained after initial protein A affinity purification. Individual experimental traces are shown overlaid in a stack plot; individual absorbances have not been scaled. Individual peaks isolated and shown to be heterodimeric are labeled with an asterisk (*).

[0092] FIG. 31 shows cation exchange chromatography of predominantly heterodimeric proteins obtained after either initial protein A affinity purification (X0132, X0171, X0172) or after secondary protein L purification (X0124, compare to FIG. 30). Individual experimental traces are shown overlaid in a stack plot; individual absorbances have not been scaled. Heterodimeric species are labeled with an asterisk (*).

[0093] FIG. 32 shows crystal structure of Ck-Ck overlaid with Ck-CH1.

[0094] FIG. 33 shows the hydrogen bond network found in the Ck-Ck interface.

[0095] FIG. 34 shows the seven residues involved in the Hydrogen bonding at the Ck-CK interface.

[0096] FIG. 35 shows SDS-PAGE results of single residue alanine scanning on X0124. “NR” stands for “Non-Reduced,” and “Red” stands for “Reduced.”

[0097] FIG. 36 shows SDS-PAGE results of double alanine scanning of selected Cκ residues. “NR” stands for “Non-Reduced,” and “Red” stands for “Reduced.”

[0098] FIG. 37 shows SDS-PAGE results of triple alanine scanning of selected Cκ residues. “NR” stands for “Non-Reduced,” and “Red” stands for “Reduced.”

[0099] FIG. 38 shows SDS-PAGE results of Interceptors containing mutations that introduce bulky amino acid side chains at four different positions: 52, 56, 68 and 70.

[0100] FIG. 39 shows SDS-PAGE results of Interceptors with combinations of bulky side chain amino acid mutations and alanine mutations introduced at selected Cκ residues.

[0101] FIG. 40 shows SDS-PAGE results of Interceptors with additional combinations of bulky side chain amino acid mutations and alanine mutations introduced at selected Cκ residues.

[0102] FIG. 41 shows SDS-PAGE analysis under non-reducing conditions of

[0103] Interceptor with combinations of bulky side chain amino acid mutations and alanine mutations introduced at positions 29, 30, 55 and 70. The left panel shows results of Interceptors with Cκ heterdimerization domains near the N-terminus of short chains (i.e., do not contain an scFv). The right panel shows results of Interceptors with Cκ heterodimerization domains near the C-terminus of the short chain.

[0104] FIG. 42 shows anti-c-Met (5D5) SMIP and Interceptor activity on HT-29 cells in a c-Met phosphorylation ELISA assay.

### DETAILED DESCRIPTION

[0105] The present disclosure provides polypeptide heterodimers formed between two different single chain polypeptides via natural heterodimerization of an immunoglobulin CH1 region and an immunoglobulin light chain constant region (CL). The longer chain of a heterodimer has a binding domain that specifically binds a target (e.g., a receptor or a ligand). In addition, both chains of a heterodimer further each comprise an Fc region portion (e.g., immunoglobulin CH2 and/or CH3 domains). The present disclosure also provides nucleic acids, vectors, host cells and methods for making polypeptide heterodimers as well as methods for using such polypeptide heterodimers, such as in reducing T cell activation, inhibiting solid malignancy growth, and treating autoimmune or inflammatory conditions.

[0106] The heterodimerization technology described herein has one or more of the following advantages: (1) minimal immunogenicity of the polypeptide heterodimers because the dimers are formed via natural heterodimerization of an immunoglobulin CH1 region and an immunoglobulin CL region; (2) efficient production and purification of polypeptide heterodimers of the present disclosure is possible by co-expressing the two different single chain polypeptides, as shown in the examples; (3) the ability to mediate Fc effector functions (e.g., CDC, ADCC, ADCP), which can be modulated up or down by mutagenesis, and a longer serum half life because each chain of a polypeptide heterodimer according to the present disclosure has an Fc region portion (e.g., immunoglobulin CH2 and CH3 domains); and (4) polypeptide heterodimers of the present disclosure having a size that is typically smaller than an antibody molecule, which can allow for better tissue penetration, such as into a solid malignancy.

[0107] The section headings used herein are for organizational purposes only and are not to be construed as limiting the subject matter described. All documents, or portions of documents, cited herein, including but not limited to patents, patent applications, articles, books, and treatises, are hereby expressly incorporated by reference in their entirety for any purpose. In the event that one or more of the incorporated documents or portions of documents defines a term that contradicts that term's definition in the application, the definition that appears in this application controls.

[0108] In the present description, any concentration range, percentage range, ratio range, or integer range is to be understood to include the value of any integer within the recited range and, when appropriate, fractions thereof (such as one tenth and one hundredth of an integer), unless otherwise indicated. As used herein, “about” means±20% of the indicated range, value, or structure, unless otherwise indicated. It should be understood that the terms “a” and “an” as used herein refer to “one or more” of the enumerated components unless otherwise indicated or dictated by its context. The use of the alternative (e.g., “or”) should be understood to mean either one, both, or any combination thereof of the alternatives. As used herein, the terms “include” and “comprise” are used synonymously. In addition, it should be understood that the individual heterodimers derived from various combinations of the components (e.g., domains, regions, hinges and linkers) described herein, are disclosed by the present application to the same extent as if each single chain polypeptide or heterodimer were set forth individually. Thus, selection of particular components of individual single chain polypeptides or heterodimers is within the scope of the present disclosure.

[0109] As used herein, a protein “consists essentially of” several domains (e.g., a binding domain that specifically binds a target, a hinge, an immunoglobulin heterodimerization domain, and an Fc region constant domain portion) if the other portions of the protein (e.g., amino acids at the amino- or carboxy-terminus or between two domains), in combination, contribute to at most 20% (e.g., at most 15%, 10%, 8%, 6%, 5%, 4%, 3%, 2% or 1%) of the length of the protein and do not substantially affect (i.e., do not reduce the activity by more than 50%, such as more than 40%, 30%, 25%, 20%, 15%, 10%, or 5%) the activities of various domains (e.g., the target binding affinity of the binding domain, the activities of the Fc region portion, and the capability of the heterodimerization domain in facilitating heterodimerization). In certain embodiments, a protein (e.g., a single chain polypeptide) consists essentially of a binding domain that specifically binds a target, an immunoglobulin heterodimerization domain, a hinge, and an Fc region portion may comprise junction amino acids at the amino- and/or carboxy-terminus of the protein or between two different domains (e.g., between the binding domain and the immunoglobulin heterodimerization domain, between the immunoglobulin heterodimerization domain and the hinge, and/or between the hinge and the Fc region portion).

[0110] A “polypeptide heterodimer,” “heterodimer,” or “Interceptor,” as used herein, refers to a dimer formed from two different single chain polypeptides, comprising at least one chain longer (long chain) than the other (short chain). This term does not include an antibody formed from four single chain polypeptides (i.e., two light chains and two heavy chains). A “dimer” refers to a biological entity that consists of two subunits associated with each other via one or more forms of intramolecular forces, including covalent bonds (e.g., disulfide bonds) and other interactions (e.g., electrostatic interactions, salt bridges, hydrogen bonding, and hydrophobic interactions), and is stable under appropriate conditions (e.g., under physiological conditions, in an aqueous solution suitable for expressing, purifying, and/or storing recombinant proteins, or under conditions for non-denaturing and/or non-reducing electrophoresis).

[0111] A “single chain polypeptide” is a single, linear and contiguous arrangement of covalently linked amino acids. It does not include two polypeptide chains that link together in a non-linear fashion, such as via an interchain disulfide bond (e.g., a half immunoglobulin molecule in which a light chain links with a heavy chain via a disulfide bond). In certain embodiments, a single chain polypeptide may have or form one or more intrachain disulfide bonds.

[0112] An “immunoglobulin heterodimerization domain,” as used herein, refers to an immunoglobulin domain (“first immunoglobulin heterodimerization domain”) that preferentially interacts or associates with a different immunoglobulin domain (“second immunoglobulin heterodimerization domain”) wherein the interaction of the different heterodimerization domains substantially contributes to or efficiently promotes heterodimerization (i.e., the formation of a dimer between two different polypeptides, which is also referred to as a heterodimer). Representative immunoglobulin heterodimerization domains of the present disclosure include an immunoglobulin CH1 region, an immunoglobulin CL region (e.g., Cκ or Cλ isotypes), or derivatives thereof, as provided herein. In certain embodiments, a polypeptide heterodimer comprises (i) a single chain polypeptide (“first single chain polypeptide”) having a first immunoglobulin heterodimerization domain and (ii) another single chain polypeptide (“second single chain polypeptide”) having a second immunoglobulin heterodimerization domain that is not the same as the first immunoglobulin heterodimerization domain, wherein the first and second immunoglobulin heterodimerization domains substantially contribute to or efficiently promote formation of the polypeptide heterodimer. The interaction(s) between the first and second heterodimerization domains substantially contributes to or efficiently promotes the heterodimerization of the first and second single chain polypeptides if there is a statistically significant reduction in the dimerization between the first and second single chain polypeptides in the absence of the first heterodimerization domain and/or the second heterodimerization domain. In certain embodiments, when the first and second single chain polypeptides are co-expressed, at least about 60%, for instance, at least about 60% to about 70%, at least about 70% to about 80%, at least about 80% to about 90%, 91%, 92%, 93%, 94%, 95%, 96%, 97%, 98%, 99%, or 100%, and at least about 90% to about 92%, 93%, 94%, 95%, 96%, 97%, 98%, or 99% of the first and second single chain polypeptides form heterodimers with each other.

[0113] A “binding domain” or “binding region,” as used herein, refers to a protein, polypeptide, oligopeptide, or peptide that possesses the ability to specifically recognize and bind to a target (e.g., CD3, CD28, c-Met, RON). A binding domain includes any naturally occurring, synthetic, semi-synthetic, or recombinantly produced binding partner for a biological molecule or another target of interest. Exemplary binding domains include single chain antibody variable regions (e.g., domain antibodies, sFv, scFv, Fab), receptor ectodomains (e.g., c-Met, RON), or ligands (e.g., cytokines, chemokines). A variety of assays are known for identifying binding domains of the present disclosure that specifically bind a particular target, including Western blot, ELISA, and Biacore analysis.

[0114] A binding domain and a fusion protein thereof “specifically binds” a target if it binds the target with an affinity or Ka (i.e., an equilibrium association constant of a particular binding interaction with units of 1/M) equal to or greater than 10⁵ M⁻¹, while not significantly binding other components present in a test sample. Binding domains (or fusion proteins thereof) may be classified as “high affinity” binding domains (or fusion proteins thereof) and “low affinity” binding domains (or fusion proteins thereof). “High affinity” binding domains refer to those binding domains with a Kₐ of at least 10⁷ M⁻¹, at least 10⁸ M⁻¹, at least 10⁹ M⁻¹, at least 10¹⁰ M⁻¹, at least 10^{11 M}^{-1,} at least 10^{12 M}⁻¹ or at least 10¹³ M⁻¹. “Low affinity” binding domains refer to those binding domains with a Kₐ of up to 10⁷ M⁻¹, up to 10⁶ M⁻¹, up to 10⁵ M⁻¹. Alternatively, affinity may be defined as an equilibrium dissociation constant (K_{d}) of a particular binding interaction with units of M (e.g., 10⁻⁵ M to 10⁻¹³ M). Affinities of binding domain polypeptides and fusion proteins according to the present disclosure can be readily determined using conventional techniques (see, e.g., Scatchard et al. (1949) Ann. N.Y. Acad. Sci. 51:660; and U.S. Pat. Nos. 5,283,173, 5,468,614, or the equivalent).

[0115] “T cell receptor” (TCR) is a molecule found on the surface of T cells that, along with CD3, is generally responsible for recognizing antigens bound to major histocompatibility complex (MHC) molecules. It consists of a disulfide-linked heterodimer of the highly variable α and β chains in most T cells. In other T cells, an alternative receptor made up of variable γ and δ chains is expressed. Each chain of the TCR is a member of the immunoglobulin superfamily and possesses one N-terminal immunoglobulin variable domain, one immunoglobulin constant domain, a transmembrane region, and a short cytoplasmic tail at the C-terminal end (see, Abbas and Lichtman, Cellular and Molecular Immunology (5th Ed.), Editor: Saunders, Philadelphia, 2003; Janeway et al., Immunobiology: The Immune System in Health and Disease, 4^{th} Ed., Current Biology Publications, p 148, 149, and 172, 1999). TCR as used in the present disclosure may be from various animal species, including human, mouse, rat, or other mammals.

[0116] “CD3” is known in the art as a multi-protein complex of six chains (see, Abbas and Lichtman, 2003; Janeway et al., p 172 and 178, 1999). In mammals, the complex comprises a CD3γ chain, a CD3δ chain, two CD3ε chains, and a homodimer of CD3ζ chains. The CD3γ, CD3δ, and CD3ε chains are highly related cell surface proteins of the immunoglobulin superfamily containing a single immunoglobulin domain. The transmembrane regions of the CD3γ, CD3δ, and CD3ε chains are negatively charged, which is a characteristic that allows these chains to associate with the positively charged T cell receptor chains. The intracellular tails of the CD3γ, CD3δ, and CD3ε chains each contain a single conserved motif known as an immunoreceptor tyrosine-based activation motif or ITAM, whereas each CD3ζ chain has three. It is believed the ITAMs are important for the signaling capacity of a TCR compelx. CD3 as used in the present disclosure may be from various animal species, including human, mouse, rat, or other mammals.

[0117] “TCR complex,” as used herein, refers to a complex formed by the association of CD3 with TCR. For example, a TCR complex can be composed of a CD3γ chain, a CD3δ chain, two CD3ε chains, a homodimer of CD3ζ chains, a TCRα chain, and a TCRβ chain. Alternatively, a TCR complex can be composed of a CD3γ chain, a CD3δ chain, two CD3ε chains, a homodimer of CD3ζ chains, a TCRγ chain, and a TCRδ chain.

[0118] “A component of a TCR complex,” as used herein, refers to a TCR chain (i.e., TCRα, TCRβ, TCRγ or TCRδ), a CD3 chain (i.e., CD3γ, CD3δ, CD3ε or CD3ζ), or a complex formed by two or more TCR chains or CD3 chains (e.g., a complex of TCRα and TCRβ, a complex of TCRγ and TCRδ, a complex of CD3ε and CD3δ, a complex of CD3γ and CD3ε, or a sub-TCR complex of TCRα, TCRβ, CDγ, CD3δ, and two CD3ε chains).

[0119] Terms understood by those in the art of antibody technology are each given the meaning acquired in the art, unless expressly defined differently herein. Antibodies are known to have variable regions, a hinge region, and constant domains. Immunoglobulin structure and function are reviewed, for example, in Harlow et al., Eds., Antibodies: A Laboratory Manual, Chapter 14 (Cold Spring Harbor Laboratory, Cold Spring Harbor, 1988).

[0120] For example, the terms “VL” and “VH” refer to the variable binding region from an antibody light and heavy chain, respectively. The variable binding regions are made up of discrete, well-defined sub-regions known as “complementarity determining regions” (CDRs) and “framework regions” (FRs).The term “CL” refers to an “immunoglobulin light chain constant region” or a “light chain constant region,” i.e., a constant region from an antibody light heavy chain. The term “CH” refers to an “immunoglobulin heavy chain constant region” or a “heavy chain constant region,” which is further divisible, depending on the antibody isotype into CH1, CH2, and CH3 (IgA, IgD, IgG), or CH1, CH2, CH3, and CH4 domains (IgE, IgM). A “Fab” (fragment antigen binding) is the part of an antibody that binds to antigens and includes the variable region and CH1 of the heavy chain linked to the light chain via an inter-chain disulfide bond.

[0121] As used herein, “an Fc region constant domain portion” or “Fc region portion” refers to the heavy chain constant region segment of the Fc fragment (the “fragment crystallizable” region or Fc region) from an antibody, which can include one or more constant domains, such as CH2, CH3, CH4, or any combination thereof. In certain embodiments, an Fc region portion includes the CH2 and CH3 domains of an IgG, IgA, or IgD antibody and any combination thereof, or the CH3 and CH4 domains of an IgM or IgE antibody and any combination thereof. In one embodiment, the CH2CH3 or the CH3CH4 structures are from the same antibody isotype, such as IgG, IgA, IgD, IgE, or IgM. By way of background, the Fc region is responsible for the effector functions of an immunoglobulin, such as ADCC (antibody-dependent cell-mediated cytotoxicity), ADCP (antibody-dependent cellular phagocytosis), CDC (complement-dependent cytotoxicity) and complement fixation, binding to Fc receptors (e.g., CD16, CD32, FcRn), greater half-life in vivo relative to a polypeptide lacking an Fc region, protein A binding, and perhaps even placental transfer (see Capon et al., Nature, 337:525 (1989)). In certain embodiments, an Fc region portion found in polypeptide heterodimers of the present disclosure will be capable of mediating one or more of these effector functions.

[0122] In addition, antibodies have a hinge sequence that is typically situated between the Fab and Fc region (but a lower section of the hinge may include an amino-terminal portion of the Fc region). By way of background, an immunoglobulin hinge acts as a flexible spacer to allow the Fab portion to move freely in space. In contrast to the constant regions, hinges are structurally diverse, varying in both sequence and length between immunoglobulin classes and even among subclasses. For example, a human IgG1 hinge region is freely flexible, which allows the Fab fragments to rotate about their axes of symmetry and move within a sphere centered at the first of two inter-heavy chain disulfide bridges. By comparison, a human IgG2 hinge is relatively short and contains a rigid poly-proline double helix stabilized by four inter-heavy chain disulfide bridges, which restricts the flexibility. A human IgG3 hinge differs from the other subclasses by its unique extended hinge region (about four times as long as the IgG1 hinge), containing 62 amino acids (including 21 prolines and 11 cysteines), forming an inflexible poly-proline double helix and providing greater flexibility because the Fab fragments are relatively far away from the Fc fragment. A human IgG4 hinge is shorter than IgG1 but has the same length as IgG2, and its flexibility is intermediate between that of IgG1 and IgG2.

[0123] According to crystallographic studies, an IgG hinge domain can be functionally and structurally subdivided into three regions: the upper, the core or middle, and the lower hinge regions (Shin et al., Immunological Reviews 130:87 (1992)). Exemplary upper hinge regions include EPKSCDKTHT (SEQ ID NO:227) as found in IgG1, ERKCCVE (SEQ ID NO:211) as found in IgG2, ELKTPLGDTT HT (SEQ ID NO:245) or EPKSCDTPPP (SEQ ID NO:246) as found in IgG3, and ESKYGPP (SEQ ID NO:247) as found in IgG4. Exemplary middle or core hinge regions include CPPCP (SEQ ID NO:228) as found in IgG1 and IgG2, CPRCP (SEQ ID NO:248) as found in IgG3, and CPSCP (SEQ ID NO:249) as found in IgG4. While IgG1, IgG2, and IgG4 antibodies each appear to have a single upper and middle hinge, IgG3 has four in tandem—one being ELKTPLGDTTHTCPRCP (SEQ ID NO:250) and three being EPKSCDTPPP CPRCP (SEQ ID NO:251).

[0124] IgA and IgD antibodies appear to lack an IgG-like core region, and IgD appears to have two upper hinge regions in tandem (see SEQ ID NOS:222 and 252).

[0125] Exemplary wild type upper hinge regions found in IgA1 and IgA2 antibodies are set forth in SEQ ID NOS:215 and 216.

[0126] IgE and IgM antibodies, in contrast, lack a typical hinge region and instead have a CH2 domain with hinge-like properties. Exemplary wild-type CH2 upper hinge-like sequences of IgE and IgM are set forth in SEQ ID NO:253 (VCSRDFTPPTVKILQSSSDGGGHFPPTIQLLCLVSGYTPGTINITWLEDG QVMDVDLSTASTTQEGELASTQSELTLSQKHWLSDRTYTCQVTYQGHTFE DSTKKCalif,) and SEQ ID NO:254 (VIAELPPKVSVFVPPRDGFFGNPRKSKLIC QATGFSPRQIQVSWLREGKQVGSGVTTDQVQAEAKESGPTTYKVTSTLTI KESDWLGQSMFTCRVDHRGLTFQQNASSMCVP), respectively.

[0127] As used herein, a “hinge region” or a “hinge” refers to (a) an immunoglobulin hinge region (made up of, for example, upper and core regions) or a functional variant thereof, including wild type and altered immunoglobulin hinges, (b) a lectin interdomain region or a functional variant thereof, (c) a cluster of differentiation (CD) molecule stalk region or a functional variant thereof, or (d) a portion of a cell surface receptor (interdomain region) that connects immunoglobulin V-like or immunoglobulin C-like domains.

[0128] As used herein, a “wild type immunoglobulin hinge region” refers to a naturally occurring upper and middle hinge amino acid sequences interposed between and connecting the CH1 and CH2 domains (for IgG, IgA, and IgD) or interposed between and connecting the CH1 and CH3 domains (for IgE and IgM) found in the heavy chain of an antibody. In certain embodiments, a wild type immunoglobulin hinge region sequence is human. In certain embodiments, the wild type immunoglobulin hinge region comprises a human IgG hinge region. Exemplary human wild type immunoglobulin hinge regions are set forth in SEQ ID NOS:215 (IgA1 hinge), 216 (IgA2 hinge), 217 (IgD hinge), 218 (IgG1 hinge), 219 (IgG2 hinge), 220 (IgG3 hinge) and 221 (IgG4 hinge).

[0129] An “altered wild type immunoglobulin hinge region” or “altered immunoglobulin hinge region” refers to (a) a wild type immunoglobulin hinge region with up to 30% amino acid changes (e.g., up to 25%, 20%, 15%, 10%, or 5% amino acid substitutions or deletions), or (b) a portion of a wild type immunoglobulin hinge region that has a length of about 5 amino acids (e.g., about 5, 6, 7, 8, 9, 10, 11, 12, 13, 14, 15, 16, 17, 18, 19, or 20 amino acids) up to about 120 amino acids (for instance, having a length of about 10 to about 40 amino acids or about 15 to about 30 amino acids or about 15 to about 20 amino acids or about 20 to about 25 amino acids), has up to about 30% amino acid changes (e.g., up to about 25%, 20%, 15%, 10%, 5%, 4%, 3%, 2%, or 1% amino acid substitutions or deletions or a combination thereof), and has an IgG core hinge region as set forth in SEQ ID NOS:228, 248, or 249.

[0130] A “peptide linker” refers to an amino acid sequence that connects a heavy chain variable region to a light chain variable region and provides a spacer function compatible with interaction of the two sub-binding domains so that the resulting polypeptide retains a specific binding affinity to the same target molecule as an antibody that comprises the same light and heavy chain variable regions. In certain embodiments, a linker is comprised of about five to about 35 amino acids, for instance, about 15 to about 25 amino acids.

[0131] “Junction amino acids” or “junction amino acid residues” refer to one or more (e.g., about 2-10) amino acid residues between two adjacent regions or domains of a single chain polypeptide, such as between a hinge and an adjacent Fc region portion or between a hinge and an adjacent binding domain or between a peptide linker that links two immunoglobulin variable domains and an adjacent immunoglobulin variable domain. Junction amino acids may result from the construct design of a single chain polypeptide (e.g., amino acid residues resulting from the use of a restriction enzyme site during the construction of a nucleic acid molecule encoding a single chain polypeptide).

[0132] A “linker between CH3 and CH1 or CL” refers to one or more (e.g., about 2-12) amino acid residues between the C-terminus of CH3 (e.g., a wild type CH3 or a mutated CH3) and the N-terminus of CH1 or CL (e.g., Ck).

[0133] A “wild type immunoglobulin region” or “wild type immunoglobulin domain” refers to a naturally occurring immunoglobulin region or domain (e.g., a naturally occurring VL, VH, hinge, CL, CH1, CH2, CH3, or CH4) from various immunoglobulin classes or subclasses (including, for example, IgG1, IgG2, IgG3, IgG4, IgA1, IgA2, IgD, IgE, and IgM) and from various species (including, for example, human, sheep, mouse, rat, and other mammals). Exemplary wild type human CH1 regions are set forth in SEQ ID NOS:114, 186-192 and 194, wild type human Cκ region in SEQ ID NO:112, wild type human Cλ regions in SEQ ID NO:113 and 224-226, wild type human CH2 domains in SEQ ID NOS:115, 195-201 and 203, wild type human CH3 domains in SEQ ID NOS:116, 204-210 and 212, and wild type human CH4 domains in SEQ ID NO:213 and 214.

[0134] An “altered immunoglobulin region” or “altered immunoglobulin domain” refers to an immunoglobulin region with a sequence identity to a wild type immunoglobulin region or domain (e.g., a wild type VL, VH, hinge, CL, CH1, CH2, CH3, or CH4) of at least 75% (e.g., 80%, 82%, 84%, 86%, 88%, 90%, 91%, 92%, 93%, 94%, 95%, 96%, 97%, 98%, 99%, or 99.5%). For example, an “altered immunoglobulin CH1 region” or “altered CH1 region” refers to a CH1 region with a sequence identity to a wild type immunoglobulin CH1 region (e.g., a human CH1) of at least 75% (e.g., 80%, 82%, 84%, 86%, 88%, 90%, 91%, 92%, 93%, 94%, 95%, 96%, 97%, 98%, 99%, or 99.5%). Similarly, an “altered immunoglobulin CH2 domain” or “altered CH2 domain” refers to a CH2 domain with a sequence identity to a wild type immunoglobulin CH1 region (e.g., a human CH2) of at least 75% (e.g., 80%, 82%, 84%, 86%, 88%, 90%, 91%, 92%, 93%, 94%, 95%, 96%, 97%, 98%, 99%, or 99.5%).

[0135] “Sequence identity,” as used herein, refers to the percentage of amino acid residues in one sequence that are identical with the amino acid residues in another reference polypeptide sequence after aligning the sequences and introducing gaps, if necessary, to achieve the maximum percent sequence identity, and not considering any conservative substitutions as part of the sequence identity. The percentage sequence identity values are generated by the NCBI BLAST2.0 software as defined by Altschul et al. (1997) “Gapped BLAST and PSI-BLAST: a new generation of protein database search programs,” Nucleic Acids Res. 25:3389-3402, with the parameters set to default values.

[0136] In certain embodiments, an altered immunoglobulin domain only contains conservative amino acid substitutions of a wild type immunoglobulin domain. In certain other embodiments, an altered immunoglobulin domain only contains non-conservative amino acid substitutions of a wild type immunoglobulin domain. In yet other embodiments, an altered immunoglobulin domain contains both conservative and non-conservative amino acid substitutions.

[0137] A “conservative substitution” is recognized in the art as a substitution of one amino acid for another amino acid that has similar properties. Exemplary conservative substitutions are well known in the art (see, e.g., WO 97/09433, page 10, published Mar. 13, 1997; Lehninger, Biochemistry, Second Edition; Worth Publishers, Inc. NY:N.Y. (1975), pp.71-77; Lewin, Genes IV, Oxford University Press, NY and Cell Press, Cambridge, Mass. (1990), p. 8). In certain embodiments, a conservative substitution includes a leucine to serine substitution.

[0138] As used herein, the term “derivative” refers to a modification of one or more amino acid residues of a peptide by chemical or biological means, either with or without an enzyme, e.g., by glycosylation, alkylation, acylation, ester formation, or amide formation. Generally, a “derivative” differs from an “analogue” in that a parent polypeptide may be the starting material to generate a “derivative,” whereas the parent polypeptide may not necessarily be used as the starting material to generate an “analogue.” A derivative may have different chemical, biological or physical properties of the parent polypeptide. For example, a derivative may be more hydrophilic or it may have altered reactivity (e.g., a CDR having an amino acid change that alters its affinity for a target) as compared to the parent polypeptide.

[0139] As used herein, unless otherwise provided, a position of an amino acid residue in a variable region of an immunoglobulin molecule is numbered according to the Kabat numbering convention (Kabat, Sequences of Proteins of Immunological Interest, 5^{th} ed. Bethesda, Md.: Public Health Service, National Institutes of Health (1991)), and a position of an amino acid residue in a constant region of an immunoglobulin molecule is numbered according to EU nomenclature (Ward et al., 1995 Therap. Immunol. 2:77-94).

[0140] A “receptor” is a protein molecule present in the plasma membrane or in the cytoplasm of a cell to which a signal molecule (i.e., a ligand, such as a hormone, a neurotransmitter, a toxin, a cytokine) may attach. The binding of the single molecule to the receptor results in a conformational change of the receptor, which ordinarily initiates a cellular response. However, some ligands merely block receptors without inducing any response (e.g., antagonists). Some receptor proteins are peripheral membrane proteins, many hormone and neurotransmitter receptors are transmembrane proteins that embedded in the phospholipid bilayer of cell membranes, and another major class of receptors are intracellular proteins such as those for steroid and intracrine peptide hormone receptors.

[0141] “Treatment,” “treating” or “ameliorating” refers to either a therapeutic treatment or prophylactic/preventative treatment. A treatment is therapeutic if at least one symptom of disease in an individual receiving treatment improves or a treatment may delay worsening of a progressive disease in an individual, or prevent onset of additional associated diseases.

[0142] A “therapeutically effective amount (or dose)” or “effective amount (or dose)” of a specific binding molecule or compound refers to that amount of the compound sufficient to result in amelioration of one or more symptoms of the disease being treated in a statistically significant manner. When referring to an individual active ingredient, administered alone, a therapeutically effective dose refers to that ingredient alone. When referring to a combination, a therapeutically effective dose refers to combined amounts of the active ingredients that result in the therapeutic effect, whether administered serially or simultaneously.

[0143] The term “pharmaceutically acceptable” refers to molecular entities and compositions that do not produce allergic or other serious adverse reactions when administered using routes well known in the art.

[0144] A “patient in need” refers to a patient at risk of, or suffering from, a disease, disorder or condition that is amenable to treatment or amelioration with a polypeptide heterodimer or a composition thereof provided herein.

[0145] The term “immunoglobulin-derived fusion protein,” as used herein, refers to a fusion protein that comprises at least one immunoglobulin region, such as a VL, VH, CL, CH1, CH2, CH3, and CH4 domain. The immunoglobulin region may be a wild type immunoglobulin region or an altered immunoglobulin region. Exemplary immunoglobulin-derived fusion proteins include single chain variable antibody fragment (scFv) (see, e.g., Huston et al., Proc. Natl. Acad. Sci. USA 85: 5879-83, 1988), small modular immunopharmaceutical (SMIP™) proteins (see, U.S. Patent Publication Nos. 2003/0133939, 2003/0118592, and 2005/0136049), PIMS proteins (see, PCT Application Publication No. WO 2009/023386), and multi-functional binding proteins (such as SCORPION™ and Xceptor proteins) (see, PCT Application Publication No. WO 2007/146968, U.S. Patent Application Publication No. 2006/0051844, and U.S. Pat. No. 7,166,707).

[0146] Additional definitions are provided throughout the present disclosure.

### Polypeptide Heterodimers

[0147] In one aspect, the present disclosure provides a polypeptide heterodimer formed by the association of two different single chain polypeptides. The first or long single chain polypeptide comprises, consists essentially of, or consists of a binding domain that specifically binds a target, a hinge, a first immunoglobulin heterodimerization domain, and an Fc region portion, whereas the second or short single chain polypeptide comprises, consists essentially of, or consists of a hinge, a second immunoglobulin heterodimerization domain, an Fc region portion, and does not comprise a target binding domain. The hinge in the first single chain polypeptide may or may not be the same as the hinge in the second single chain polypeptide. The first immunoglobulin heterodimerization domain in the first single chain polypeptide is different from the second immunoglobulin heterodimerization domain in the second single chain polypeptide. The Fc region portion of the first single chain polypeptide may be the same as the Fc region portion of the second single chain polypeptide. The individual components of the polypeptide heterodimers of the present disclosure are described in detail herein.

### Binding Domains

[0148] As indicated above, a long single chain polypeptide of the polypeptide heterodimer of the present disclosure comprises a binding domain that specifically binds a target. Binding of a target by the binding domain may block the interaction between the target (e.g., a receptor or a ligand) and another molecule, and thus interfere, reduce or eliminate certain functions of the target (e.g., signal transduction).

[0149] A binding domain may be any peptide that specifically binds a target of interest. Sources of binding domains include antibody variable regions from various species (which can be formatted as antibodies, sFvs, scFvs, Fabs, or soluble VH domain or domain antibodies), including human, rodent, avian, and ovine. Additional sources of binding domains include variable regions of antibodies from other species, such as camelid (from camels, dromedaries, or llamas; Ghahroudi et al. (1997) FEBS Letters 414(3):521-526; Vincke et al. (2009) Journal of Biological Chemistry (2009) 284:3273-3284; Hamers-Casterman et al. (1993) Nature, 363:446 and Nguyen et al. (1998) J. Mol. Biol., 275:413), nurse sharks (Roux et al. (1998) Proc. Nat'l. Acad. Sci. (USA) 95:11804), spotted ratfish (Nguyen et al. (2002) Immunogenetics, 54:39), or lamprey (Herrin et al., (2008) Proc. Nat'l. Acad. Sci. (USA) 105:2040-2045 and Alder et al. (2008) Nature Immunology 9:319-327). These antibodies can apparently form antigen-binding regions using only heavy chain variable region, i.e., these functional antibodies are homodimers of heavy chains only (referred to as “heavy chain antibodies”) (Jespers et al. (2004) Nature Biotechnology 22:1161-1165; Cortez-Retamozo et al. (2004) Cancer Research 64:2853-2857; Baral et al. (2006) Nature Medicine 12:580-584, and Barthelemy et al. (2008) Journal of Biological Chemistry 283:3639-3654).

[0150] An alternative source of binding domains of this disclosure includes sequences that encode random peptide libraries or sequences that encode an engineered diversity of amino acids in loop regions of alternative non-antibody scaffolds, such as fibrinogen domains (see, e.g., Weisel et al. (1985) Science 230:1388), Kunitz domains (see, e.g., U.S. Pat. No. 6,423,498), ankyrin repeat proteins (Binz et al. (2003) Journal of Molecular Biology 332:489-503 and Binz et al. (2004) Nature Biotechnology 22(5):575-582), fibronectin binding domains (Richards et al. (2003) Journal of Molecular Biology 326:1475-1488; Parker et al. (2005) Protein Engineering Design and Selection 18(9):435-444 and Hackel et al. (2008) Journal of Molecular Biology 381:1238-1252), cysteine-knot miniproteins (Vita et al. (1995) Proc. Nat'l. Acad. Sci. (USA) 92:6404-6408; Martin et al. (2002) Nature Biotechnology 21:71-76 and Huang et al. (2005) Structure 13:755-768), tetratricopeptide repeat domains (Main et al. (2003) Structure 11:497-508 and Cortajarena et al. (2008) ACS Chemical Biology 3:161-166), leucine-rich repeat domains (Stumpp et al. (2003) Journal of Molecular Biology 332:471-487), lipocalin domains (see, e.g., WO 2006/095164, Beste et al. (1999) Proc. Nat'l. Acad. Sci. (USA) 96:1898-1903 and Schonfeld et al. (2009) Proc. Nat'l. Acad. Sci. (USA) 106:8198-8203), V-like domains (see, e.g., US Patent Application Publication No. 2007/0065431), C-type lectin domains (Zelensky and Gready (2005) FEBS J. 272:6179; Beavil et al. (1992) Proc. Nat'l. Acad. Sci. (USA) 89:753-757 and Sato et al. (2003) Proc. Nat'l. Acad. Sci. (USA) 100:7779-7784), mAb² or Fcab™ (see, e.g., PCT Patent Application Publication Nos. WO 2007/098934; WO 2006/072620), or the like (Nord et al. (1995) Protein Engineering 8(6):601-608; Nord et al. (1997) Nature Biotechnology 15:772-777; Nord et al. (2001) European Journal of Biochemistry 268(15):4269-4277 and Binz et al. (2005) Nature Biotechnology 23:1257-1268).

[0151] Exemplary anti-CD3 antibodies from which the binding domain of this disclosure may be derived include Cris-7 monoclonal antibody (Reinherz, E. L. et al. (eds.), Leukocyte typing II., Springer Verlag, New York, (1986)), BC3 monoclonal antibody (Anasetti et al. (1990) J. Exp. Med. 172:1691), OKT3 (Ortho multicenter Transplant Study Group (1985) N. Engl. J. Med. 313:337) and derivatives thereof such as OKT3 ala-ala (Herold et al. (2003) J. Clin. Invest. 11:409), visilizumab (Carpenter et al. (2002) Blood 99:2712), and 145-2C11 monoclonal antibody (Hirsch et al. (1988) J. Immunol. 140: 3766). An exemplary anti-TCR antibody is H57 monoclonal antibody (Lavasani et al. (2007) Scandinavian Journal of Immunology 65:39-47).

[0152] Binding domains of this disclosure can be generated as described herein or by a variety of methods known in the art (see, e.g., U.S. Pat. Nos. 6,291,161 and 6,291,158). For example, binding domains of this disclosure may be identified by screening a Fab phage library for Fab fragments that specifically bind to a target of interest (see Hoet et al. (2005) Nature Biotechnol. 23:344). Additionally, traditional strategies for hybridoma development using a target of interest as an immunogen in convenient systems (e.g., mice, HuMAb mouse®, TC mouse™, KMmouse®, llamas, chicken, rats, hamsters, rabbits, etc.) can be used to develop binding domains of this disclosure.

[0153] In some embodiments, a binding domain is a single chain Fv fragment (scFv) that comprises VH and VL regions specific for a target of interest. In certain embodiments, the V_{H} and V_{L} domains are human. Exemplary VH regions include the VH region of 2E12 (anti-CD28) scFv as set forth in SEQ ID NO:106, the VH region of P2C2 (anti-CD79b) scFv as set forth in SEQ ID NO:184, the VH region of 5D5 (anti-c-Met) scFv as set forth in SEQ ID NO:258. Exemplary VL domains are the VL region of 2E12 scFv as set forth in SEQ ID NO:107, the VL region of P2C2 scFv as set forth in SEQ ID NO:182, the VL region of 5D5 (anti-c-Met) scFv as set forth in SEQ ID NO:259.

[0154] In certain embodiments, a binding domain comprises or is a sequence that is at least 90%, at least 91%, at least 92%, at least 93%, at least 94%, at least 95%, at least 96%, at least 97%, at least 98%, at least 99%, at least 99.5%, or 100% identical to an amino acid sequence of a light chain variable region (V_{L}) (e.g., SEQ ID NOS:107, 182 and 259) or to a heavy chain variable region (V_{H}) (e.g., SEQ ID NOS:106, 184 and 258), or both, wherein each CDR comprises zero changes or at most one, two, or three changes, from a monoclonal antibody or fragment or derivative thereof that specifically binds to target of interest (e.g., c-Met, RON, CD28, CD79b, HER3).

[0155] In certain embodiments, a binding domain VH region of the present disclosure can be derived from or based on a VH of a known monoclonal antibody and contains one or more (e.g., 2, 3, 4, 5, 6, 7, 8, 9, 10) insertions, one or more (e.g., 2, 3, 4, 5, 6, 7, 8, 9, 10) deletions, one or more (e.g., 2, 3, 4, 5, 6, 7, 8, 9, 10) amino acid substitutions (e.g., conservative amino acid substitutions or non-conservative amino acid substitutions), or a combination of the above-noted changes, when compared with the VH of a known monoclonal antibody. The insertion(s), deletion(s) or substitution(s) may be anywhere in the VH region, including at the amino- or carboxy-terminus or both ends of this region, provided that each CDR comprises zero changes or at most one, two, or three changes and provided a binding domain containing the modified VH region can still specifically bind its target with an affinity similar to the wild type binding domain.

[0156] In further embodiments, a VL region in a binding domain of the present disclosure is derived from or based on a VL of a known monoclonal antibody and contains one or more (e.g., 2, 3, 4, 5, 6, 7, 8, 9, 10) insertions, one or more (e.g., 2, 3, 4, 5, 6, 7, 8, 9, 10) deletions, one or more (e.g., 2, 3, 4, 5, 6, 7, 8, 9, 10) amino acid substitutions (e.g., conservative amino acid substitutions), or a combination of the above-noted changes, when compared with the VL of the known monoclonal antibody. The insertion(s), deletion(s) or substitution(s) may be anywhere in the VL region, including at the amino- or carboxy-terminus or both ends of this region, provided that each CDR comprises zero changes or at most one, two, or three changes and provided a binding domain containing the modified V_{L} region can still specifically bind its target with an affinity similar to the wild type binding domain.

[0157] The VH and VL domains may be arranged in either orientation (i.e., from amino-terminus to carboxyl terminus, VH-VL or VL-VH) and may be joined by an amino acid sequence (e.g., having a length of about five to about 35 amino acids) capable of providing a spacer function such that the two sub-binding domains can interact to form a functional binding domain. In certain embodiments, an amino acid sequence that joins the VH and VL domains (also referred to herein as a “linker”) includes those belonging to the (GlyₙSer) family, such as (Gly₃Ser)ₙ(Gly₄Ser)₁, (Gly₃Ser)₁(Gly₄Ser)ₙ, (Gly₃Ser)ₙ(Gly₄Ser)ₙ, or (Gly₄Ser)ₙ, wherein n is an integer of 1 to 5. In certain embodiments, the linker is GGGGSGGGGS GGGGS (SEQ ID NO:183) or GGGGSGGGGS GGGGSGGGGS (SEQ ID NO:108). In certain embodiments, these (GlyₙSer)-based linkers are used to link the VH and VL domains in a binding domain, but are not used to link a binding domain to an immunoglobulin heterodimerization domain or to an Fc region portion.

[0158] Exemplary binding domains specific for CD28 include a 2E12 scFv as set forth in SEQ ID NO:109, binding domains specific for CD79b include a P2C2 scFv as set forth in SEQ ID NO:185, binding domains specific for c-Met include a 5D5 scFv as set forth in SEQ ID NO:257, binding domains specific for RON include a 4C04 scFv as set forth in SEQ ID NO:261 and a 11H09 scFv as set forth in SEQ ID NO:265, and binding domains specific for CD3 include a humanized Cris7 scFv as set forth in SEQ ID NO:786.

[0159] The light chain amino acid sequence of the 4C04 scFv is set forth in SEQ ID NO:602, and its CDR1, CDR2, and CDR3 are set forth in SEQ ID NOS:604-606, respectively. The heavy chain amino acid sequence of the 4C04 scFv is set forth in SEQ ID NO:603, and its CDR1, CDR2, and CDR3 are set forth in SEQ ID NOS:607-609, respectively.

[0160] The light chain amino acid sequence of the 11H09 scFv is set forth in SEQ ID NO:610, and its CDR1, CDR2, and CDR3 are set forth in SEQ ID NOS:612-614, respectively. The heavy chain amino acid sequence of the 11H09 scFv is set forth in SEQ ID NO:611, and its CDR1, CDR2, and CDR3 are set forth in SEQ ID NOS:615-617, respectively.

[0161] Additional binding domains specific for c-Met comprise anti-c-Met light chain CDRs, anti-c-Met heavy chain CDRs, or both anti-c-Met light and heavy chain CDRs as shown in Tables 1 and 2. For example, a c-Met-specific binding domain may comprise: (a) light chain CDR1, CDR2 and CDR3 as set forth in SEQ ID NOS:296-298, respectively, (b) heavy chain CDR1, CDR2 and CDR3 as set forth in SEQ ID NOS:464-466, respectively, or (c) both light chain CDR1, CDR2 and CDR3 as set forth in SEQ ID NOS:296-298, respectively, and heavy chain CDR1, CDR2 and CDR3 as set forth in SEQ ID NOS:464-466, respectively,

TABLE 1
Anti-c-Met Light Chain Complementarity Determining Regions

| | | SEQ | | SEQ | | SEQ |
|---|---|---|---|---|---|---|
| Binding | | ID | | ID | | ID |
| Domain | CDR1 | NO. | CDR2 | NO. | CDR3 | NO. |
| TRU(H)-301 | QGDSLRNYHPS | 597 | GKNNRPS | 268 | NSRDSSGNLVF | 269 |
| TRU(H)-302 | SGDKLGDKYAS | 270 | QDRKRPS | 271 | QAWDSNTVV | 272 |
| TRU(H)-303 | SGSSSNIGSDYVH | 273 | RNNKRPS | 274 | AAWDDSLNGWV | 275 |
| TRU(H)-304 | SGDKLGDKYAS | 276 | EDNKRPS | 277 | QTWASGTVL | 278 |
| TRU(H)-305 | SGSSSNIGSNTVN | 279 | ANNQRPS | 280 | AVWDDSLNAWV | 281 |
| TRU(H)-306 | SGDKLENKYTS | 282 | EDIERPS | 283 | QAWDSNIAVV | 284 |
| TRU(H)-307 | SGGNSNIGSHYVY | 285 | RDNQRPS | 286 | AAWDDSLGGPV | 287 |
| TRU(H)-308 | SGSSSNIGRNAVN | 288 | NNNQRPS | 289 | AAWDDSLNGWV | 593 |
| TRU(H)-309 | GGNNIGDKSVH | 290 | EDKNRPA | 291 | QVWDSSTDHHV | 292 |
| TRU(H)-310 | GGNNIGTTSVQ | 293 | YGSDRPS | 294 | QTWVKGAGI | 295 |
| TRU(H)-311 | RASQSIRNYLN | 296 | AASSLQS | 297 | QQSYVTPLT | 298 |
| TRU(H)-312 | RASQSVNSLN | 299 | GISSLRR | 300 | QQSHSVPLT | 301 |
| TRU(H)-313 | RASQGIRNDLG | 302 | AASSLQS | 303 | LQHNSYPPT | 304 |
| TRU(H)-314 | RASQSVSSDLA | 305 | DAFKRAT | 306 | QQRSNWPLT | 307 |
| TRU(H)-315 | RASQSVSSYLA | 308 | DASNRAT | 309 | QQRSNWPLT | 310 |
| TRU(H)-316 | RSSQSLLYSNGYNYLD | 311 | LGSNRAS | 312 | MQALQSPLT | 313 |
| TRU(H)-317 | RASQSVSSSYLA | 314 | GASSRAT | 315 | QQRSI | 316 |
| TRU(H)-318 | RTSQYIRTNLA | 317 | DGSNRAT | 318 | QQRSNWPLT | 319 |
| TRU(H)-319 | RTSQQIMTYLN | 320 | VASRLQG | 321 | QQSFWTPLT | 322 |
| TRU(H)-320 | QASQDIDNYLN | 333 | DAYNLKA | 334 | QVFDDLSVT | 335 |
| TRU(H)-321 | RASQGIKNDLG | 336 | AASSLQS | 337 | QQSNSFPLT | 338 |
| TRU(H)-322 | QASHDINNYLN | 339 | DASNLQS | 340 | QQYDTLPVT | 341 |
| TRU(H)-323 | AGSSSNIGSNSVY | 342 | SNNKRPS | 343 | AAWDDSLRSVV | 344 |
| TRU(H)-324 | SGSSSTIGSNFVN | 345 | TNNQRPS | 346 | ATWDDNLLGPV | 347 |
| TRU(H)-325 | RASEGISSRLA | 348 | ATSSLQS | 349 | LQANTLPLT | 350 |
| TRU(H)-326 | RASLGVSNYLA | 351 | AASILQT | 352 | QHYQGYPYT | 353 |
| TRU(H)-327 | RASQSIDTYLN | 354 | AASKLED | 355 | QQSYSSPGIT | 356 |
| TRU(H)-328 | QASQDISDYLN | 357 | DASNLET | 358 | QQNDNLPFT | 359 |
| TRU(H)-329 | RASQSISSYLN | 360 | AASSLQS | 361 | QQSYSTPYT | 362 |
| TRU(H)-330 | RAGQAIRNNLG | 363 | AASSLQS | 364 | LQHNSFPYT | 365 |
| TRU(H)-331 | QASQDIINYLN | 366 | DASNLET | 367 | QQYDNLPYT | 368 |
| TRU(H)-332 | RATQSVRHNYLA | 369 | GAFFRAT | 370 | QQYGSSPVT | 371 |
| TRU(H)-333 | RASQSISSYLN | 372 | AASSLQS | 373 | QQSYSTSYT | 374 |
| TRU(H)-334 | RASQSVSSRYLA | 375 | AASSRAT | 376 | QQYGSSPPYT | 377 |
| TRU(H)-335 | RASQSVSFSLA | 378 | DTSNRVA | 379 | QHRSNWPG | 380 |
| TRU(H)-336 | QASQDIINYLN | 381 | DASNLET | 382 | QQYDNLPYT | 383 |
| TRU(H)-337 | QASQHISKYLN | 384 | DASNLET | 385 | QQYDNLPLT | 386 |
| TRU(H)-338 | RASQSIGSYLN | 387 | AATSLHT | 388 | QQYDNYPLT | 389 |
| TRU(H)-339 | RASQGIRNDLG | 390 | AASSLQS | 391 | LQHNSYPRT | 392 |
| TRU(H)-340 | RASQSVSSNLA | 393 | GASTRAT | 394 | QQYNNWPRT | 395 |
| TRU(H)-341 | RASQRIINYVS | 396 | GASTLQT | 397 | RQSYSSPLT | 398 |
| TRU(H)-342 | RASQTITTSLN | 399 | AASRLQN | 400 | QQSYNIPYT | 401 |
| TRU(H)-343 | RASQSIGSYLN | 402 | DASNLQS | 403 | QQSYRLFPT | 404 |
| TRU(H)-344 | QASQGIYNYVN | 405 | DASNLET | 406 | QQYDDVPIT | 407 |
| TRU(H)-345 | RASQGISSWLA | 408 | AASSLQS | 409 | QQANSFPIT | 410 |
| TRU(H)-346 | RSSQSIAKYLT | 411 | AASELQS | 412 | QQTYSFPHT | 413 |
| TRU(H)-347 | AGNNIGSKSVH | 414 | DDSDRPP | 415 | QVWDSDSDHYV | 416 |
| TRU(H)-348 | SGDRLGDKYAS | 417 | DDSERPS | 418 | QVWDSSIV | 419 |
| TRU(H)-349 | TGSTSDVGGYTYVS | 420 | DVSKRPS | 421 | CSYAGSYSYV | 422 |
| TRU(H)-350 | SGDKLGDKYAC | 423 | QDSKRPS | 424 | QAWDSSTYV | 425 |
| TRU(H)-351 | TGTSSDVGGHNYVS | 426 | DVSKRPS | 427 | CSYAGRYTYV | 428 |
| TRU(H)-352 | SGDRLEDKYTS | 429 | QDNKRPS | 430 | QAWDSSSAYV | 431 |
| TRU(H)-353 | GGNNIGSKSVH | 432 | FFDYDRPS | 433 | QVWDSRTDRYV | 434 |

TABLE 2
Anti-c-Met Heavy Chain Complementarity Determining Regions

| | | SEQ | | SEQ | | SEQ |
|---|---|---|---|---|---|---|
| Binding | | ID | | ID | | ID |
| Domain | CDR1 | NO. | CDR2 | NO. | CDR3 | NO. |
| TRU(H)- | IYDMH | 435 | WISPSGGRTLYADSVKG | 436 | TWDYYDSSGYFNDAFDI | 437 |
| 301 | | | | | | |
| TRU(H)- | AYNMA | 438 | SIVSSGGTTTYADSVKG | 439 | GGVGWLLDY | 440 |
| 302 | | | | | | |
| TRU(H)- | AYQMG | 441 | SISSSGGYTSYADSVKG | 442 | ESRYYFDY | 443 |
| 303 | | | | | | |
| TRU(H)- | EYPMI | 444 | GIGSSGGSTTYADSVKG | 445 | APLYSSTSYAFDI | 446 |
| 304 | | | | | | |
| TRU(H)- | FYWMI | 447 | GIGPSGGTTFYADSVKG | 448 | GGSYFDL | 594 |
| 305 | | | | | | |
| TRU(H)- | GYGMV | 449 | SISPSGGETLYADSVKG | 450 | GQMWPGVAFEM | 451 |
| 306 | | | | | | |
| TRU(H)- | LYFMT | 452 | SIGSSDGYTRYADSVKG | 453 | DLSWWPDAFDI | 454 |
| 307 | | | | | | |
| TRU(H)- | PYRME | 455 | WIYSSGGITNYADSVKG | 456 | | |
| 308 | | | | | | |
| TRU(H)- | VYDMV | 458 | SIGPSGGWTGYADSVKG | 459 | DSGGWEALYYYYYMDV | 460 |
| 309 | | | | | | |
| TRU(H)- | VYFMD | 461 | GIGPSGGVTSYADSVKG | 462 | GQLAQGHYYMDV | 463 |
| 310 | | | | | | |
| TRU(H)- | KYDML | 464 | YIYPSGGLTEYADSVKG | 465 | RAPRSLSFDI | 466 |
| 311 | | | | | | |
| TRU(H)- | RYMMA | 467 | SIYPSGGVTEYADSVKG | 468 | EGWYGYPT | 469 |
| 312 | | | | | | |
| TRU(H)- | RYMMG | 470 | VIVPSGGFTMYADSVKG | 471 | SSRLWSGYYPFDY | 472 |
| 313 | | | | | | |
| TRU(H)- | RYSMT | 473 | SIYSSGGETGYADSVKG | 474 | ERYNSFTS | 475 |
| 314 | | | | | | |
| TRU(H)- | SYVMV | 476 | VISPSGGVTFYADSVKG | 477 | DRRSNSLFDP | 478 |
| 315 | | | | | | |
| TRU(H)- | TYGMV | 479 | YIWPSGGLTWYADSVKG | 480 | SGYSYGRFDY | 481 |
| 316 | | | | | | |
| TRU(H)- | YYDMG | 482 | WISPSGGSTLYADSVKG | 483 | SGLYGSGSYAAFDV | 484 |
| 317 | | | | | | |
| TRU(H)- | YYHMV | 485 | YISPSGGDTHYADSVKG | 486 | GRYYGMDV | 487 |
| 318 | | | | | | |
| TRU(H)- | GYIMM | 488 | GIYPSGGGTDYADSVKG | 489 | ERPGYYDSTDDDYYYYP | 490 |
| 319 | | | | | MDV | |
| TRU(H)- | VYWME | 491 | SISSSGGLTSYADSVKG | 492 | DLVSNWPWGGY | 493 |
| 320 | | | | | | |
| TRU(H)- | HYKMG | 494 | SISSSGGDTAYADSVKG | 495 | DRAPYYYDSSGYYSDY | 496 |
| 321 | | | | | | |
| TRU(H)- | HYAMY | 497 | SISPSGGYTYYADSVKG | 498 | ESGTTNAFDI | 499 |
| 322 | | | | | | |
| TRU(H)- | NYHME | 500 | YISPSGGSTHYADSVKG | 501 | DGWTVPRD | 502 |
| 323 | | | | | | |
| TRU(H)- | RYWMA | 503 | SIVSSGGMTDYADSVKG | 504 | HRGDSGLDY | 505 |
| 324 | | | | | | |
| TRU(H)- | HYPML | 506 | GISSSGGWTDYADSVKG | 507 | DRALGMDV | 508 |
| 325 | | | | | | |
| TRU(H)- | LYSMV | 509 | RIRPSGGQTMYADSVKG | 510 | GYAFDI | 511 |
| 326 | | | | | | |
| TRU(H)- | FYDML | 512 | SIWSSGGQTGYADSVKG | 513 | EKASDLSGSYSEALDY | 514 |
| 327 | | | | | | |
| TRU(H)- | NYHMN | 515 | YIYPSGGVTYYADSVKG | 516 | GIAAAGNYYYYYGMDV | 517 |
| 328 | | | | | | |
| TRU(H)- | KYGMV | 518 | SISSSGGNTAYADSVKG | 519 | GELERRRRNYYGMDV | 520 |
| 329 | | | | | | |
| TRU(H)- | NYAMT | 521 | SIYSSGGDTAYADYVKG | 522 | EYYTGWNFDY | 523 |
| 330 | | | | | | |
| TRU(H)- | QYDMV | 524 | YIYSSGGHTLYVDSVKG | 525 | IRSSGYYHEVLDY | 526 |
| 331 | | | | | | |
| TRU(H)- | TYMMY | 527 | VIGPSGGATGYADSVKG | 528 | IRKAFGYGSGSLDY | 529 |
| 332 | | | | | | |
| TRU(H)- | YYDMQ | 530 | YIGPSGGDTDYADSVKG | 531 | SSYYYDSSGYYHEAFDI | 532 |
| 333 | | | | | | |
| TRU(H)- | YYMMR | 533 | YIGPSGGATTYADSVKG | 534 | GRSVKYYYDSSGYLLFD | 535 |
| 334 | | | | | Y | |
| TRU(H)- | HYSMY | 536 | GIYSSGGPTIYADSVKG | 537 | LQIEMATIGHFDY | 538 |
| 335 | | | | | | |
| TRU(H)- | QYDMV | 539 | YIYSSGGHTLYVDSVKG | 540 | IRSSGYYHEVLDY | 541 |
| 336 | | | | | | |
| TRU(H)- | HYWMM | 542 | SIVPSGGDTYYADSVKG | 543 | DPVMTPVDY | 544 |
| 337 | | | | | | |
| TRU(H)- | PYFMN | 545 | SIYPSGGITKYADSVKG | 546 | ETYYYGSGSYAFDI | 547 |
| 338 | | | | | | |
| TRU(H)- | QYYMY | 548 | RISPSGGMTSYADSVKG | 549 | HKYGGPDF | 550 |
| 339 | | | | | | |
| TRU(H)- | RYQMN | 551 | SIRSSGGVTKYADSVKG | 552 | GRGLSS | 553 |
| 340 | | | | | | |
| TRU(H)- | LYTMA | 554 | YISPSGGFTGYADSVKG | 555 | WGDP | 556 |
| 341 | | | | | | |
| TRU(H)- | DYFMG | 557 | RISSSGGHTMYADSVKG | 558 | EEDYYDSSGYYPPAFDI | 559 |
| 342 | | | | | | |
| TRU(H)- | IYWMY | 560 | GIGPSGGYTSYADSVKG | 561 | GNGGFDS | 562 |
| 343 | | | | | | |
| TRU(H)- | PYHMS | 563 | SIYPSGGFTAYADSVKG | 564 | ESAYYYDSSPPAFDI | 565 |
| 344 | | | | | | |
| TRU(H)- | TYAMY | 566 | SIYSSGGATWYADSVKG | 567 | STFDYFDY | 568 |
| 345 | | | | | | |
| TRU(H)- | KYRMM | 569 | YISSSGGATIYADSVKG | 570 | HGPQIAAWYFDL | 571 |
| 346 | | | | | | |
| TRU(H)- | PYSMD | 572 | GISSSGGRTVYADSVKG | 573 | GPYYDFWSGYYIDRGPL | 574 |
| 347 | | | | | DY | |
| TRU(H)- | WYMMA | 575 | WISSSGGFTPYADSVKG | 576 | GQQWPGVAFDI | 577 |
| 348 | | | | | | |
| TRU(H)- | FYPMM | 578 | YIGPSGGNNADSVKG | 579 | GLWFGGRLDY | 580 |
| 349 | | | | | | |
| TRU(H)- | HYWMK | 581 | GISSSGGQTDYADSVKG | 582 | SPRLRFLEWPRNYYGMD | 583 |
| 350 | | | | | V | |
| TRU(H)- | LYMMV | 584 | YIGPSGGAYADSVKG | 585 | SVRGLTFDY | 586 |
| 351 | | | | | | |
| TRU(H)- | PYEMG | 587 | RISPSGGMTLYADSVKG | 588 | MGRGGWWAFDAFDI | 589 |
| 352 | | | | | | |
| TRU(H)- | WYKMV | 590 | GIYPSGGTTHYADSVKG | 591 | GGGDFWSGYYPFDY | 592 |
| 353 | | | | | | |

[0162] A target molecule, which is specifically bound by a binding domain contained in a polypeptide heterodimer of the present disclosure, may be found on or in association with a cell of interest (“target cell”). Exemplary target cells include a cancer cells, a cell associated with an autoimmune disease or disorder or with an inflammatory disease or disorder, and an infectious cell (e.g., an infectious bacterium). A cell of an infectious organism, such as a mammalian parasite, is also contemplated as a target cell.

[0163] In certain embodiments, binding domains of polypeptide heterodimers of the present disclosure recognize a target selected from a tumor antigen, a B-cell target, a TNF receptor superfamily member, a Hedgehog family member, a receptor tyrosine kinase, a proteoglycan-related molecule, a TGF-β superfamily member, a Wnt-related molecule, a T-cell target, a Dendritic cell target, an NK cell target, a monocyte/macrophage cell target, or an angiogenesis target. Specific examples of such targets may be found, for example, in PCT Publication No. WO 2007/146968, which targets are incorporated herein by reference. In further embodiments, the binding domains of polypeptide heterodimers of the present disclosure bind a receptor protein, such as peripheral membrane receptor proteins or transmembrane receptor proteins.

[0164] In certain embodiments, a polypeptide heterodimer of the present disclosure specifically binds a target such as c-Met, RON, CD3, CEACAM6, EGFR, ErbB3, ErbB4, EphA2, IGF1R, GHRHR, GHR, FLT1, KDR, FLT4, CD44v6, CD151, GITR, BTLA, TGFBR2, TGFBR1, IL6R, gp130, TNFR1, TNFR2, PD1, PD-L1, PD-L2, HVEM, RANK, TNFRSF4, CD40, CD137, TWEAK-R, LTβR, LIFRβ, LRP5, OSMRβ, TCRα, TCRβ, CD19, CD28, CD80, CD81, CD86, TLR7, TLR9, PTCH1, Robo1, Frizzled, OX40 (also referred to as CD134), and CD79b.

[0165] A binding domain may be located either amino terminal or carboxyl terminal to the Fc region portion of a single chain polypeptide of the present disclosure. In certain embodiments, the binding domain is located at the amino terminus of a single chain polypeptide. In certain other embodiments, the binding domain is located at the carboxyl terminus of a single chain polypeptide.

[0166] A single chain polypeptide comprising a binding domain may comprise a CH1 region as an immunoglobulin heterodimerization domain. Alternatively, a single chain polypeptide that comprises a binding domain may comprise a CL domain as an immunoglobulin heterodimerization domain.

### Heterodimerization Domains

[0167] As indicated above, a polypeptide heterodimer of the present disclosure comprises an immunoglobulin heterodimerization domain in each polypeptide chain. The immunoglobulin heterodimerization domain in a first chain of a polypeptide heterodimer is different from the immunoglobulin heterodimerization domain in a second chain of the heterodimer so that the immunoglobulin heterodimerization domains may be differentially modified to facilitate heterodimerization of the first and second chains and to minimize first chain homodimerization or second chain homodimerization. As shown in the examples, immunoglobulin heterodimerization domains provided herein allow for efficient heterodimerization between different polypeptides and can facilitate purification of the resulting polypeptide heterodimers.

[0168] As provided herein, immunoglobulin heterodimerization domains useful for promoting heterodimerization of two different single chain polypeptides (e.g., one short and one long) according to the present disclosure include immunoglobulin CH1 and CL domains, for instance, human CH1 and CL domains. In certain embodiments, an immunoglobulin heterodimerization domain is a wild type CH1 region, such as a wild type IgG1, IgG2, IgG3, IgG4, IgA1, IgA2 IgD, IgE, or IgM CH1 region. In further embodiments, an immunoglobulin heterodimerization domain is a wild type human IgG1, IgG2, IgG3, IgG4, IgA1, IgA2, IgD, IgE, or IgM CH1 region as set forth in SEQ ID NOS:114, 186-192 and 194, respectively. In certain embodiments, an immunoglobulin heterodimerization domain is a wild type human IgG1 CH1 region as set forth in SEQ ID NO:114.

[0169] In further embodiments, an immunoglobulin heterodimerization domain is an altered immunoglobulin CH1 region, such as an altered IgG1, IgG2, IgG3, IgG4, IgA1, IgA2 IgD, IgE, or IgM CH1 region. In certain embodiments, an immunoglobulin heterodimerization domain is an altered human IgG1, IgG2, IgG3, IgG4, IgA1, IgA2, IgD, IgE, or IgM CH1 region. In still further embodiments, a cysteine residue of a wild type CH1 region (e.g., a human CH1) involved in forming a disulfide bond with a wild type immunoglobulin CL domain (e.g., a human CL) is deleted or substituted in the altered immunoglobulin CH1 region such that a disulfide bond is not formed between the altered CH1 region and the wild type CL domain.

[0170] In certain embodiments, an immunoglobulin heterodimerization domain is a wild type CL domain, such as a wild type Cδ domain or a wild type Cλ domain. In particular embodiments, an immunoglobulin heterodimerization domain is a wild type human Cκ or human Cλ domain as set forth in SEQ ID NOS:112 and 113, respectively. In further embodiments, an immunoglobulin heterodimerization domain is an altered immunoglobulin CL domain, such as an altered Cκ or Cλ domain, for instance, an altered human Cκ or human Cλ domain.

[0171] In certain embodiments, a cysteine residue of a wild type CL domain (e.g., a human CL) involved in forming a disulfide bond with a wild type immunoglobulin CH1 region (e.g., a human CH1) is deleted or substituted in the altered immunoglobulin CL domain. Such altered CL domains may further comprise an amino acid deletion at their amino termini. An exemplary Cκ domain is set forth in SEQ ID NO:141, in which the first arginine and the last cysteine of the wild type human Ck domain are both deleted. In certain embodiments, only the last cysteine of the wild type human Ck domain is deleted in the altered Ck domain because the first arginine deleted from the wild type human Ck domain may be provided by a linker that has an arginine at its carboxyl terminus and links the amino terminus of the altered Ck domain with another domain (e.g., an Fc region portion). An exemplary Cλ domain is set forth in SEQ ID NO:140, in which the first arginine of a wild type human Cλ domain is deleted and the cysteine involved in forming a disulfide bond with a cysteine in a CH1 region is substituted by a serine.

[0172] In further embodiments, an immunoglobulin heterodimerization domain is an altered Cκ domain that contains one or more amino acid substitutions, as compared to a wild type Cκ domain, at positions that may be involved in forming the interchain-hydrogen bond network at a Cκ-Cκ interface. For example, in certain embodiments, an immunoglobulin heterodimerization domain is an altered human Cκ domain having one or more amino acids at positions N29, N30, Q52, V55, T56, S68 or T70 that are substituted with a different amino acid. The numbering of the amino acids is based on their positions in the altered human Cκ sequence as set forth in SEQ ID NO:141. In certain embodiments, an immunoglobulin heterodimerization domain is an altered human Cκ domain having one, two, three or four amino acid substitutions at positions N29, N30, V55, or T70. The amino acid used as a substitute at the above-noted positions may be an alanine, or an amino acid residue with a bulk side chain moiety such as arginine, tryptophan, tyrosine, glutamate, glutamine, or lysine. Additional amino acid residues that may be used to substitute amino acid residues of the wild type human Ck sequence at the above noted positions (e.g., N30) include aspartate, methionine, serine and phenyalanine. Exemplary altered human Cκ domains are set forth in SEQ ID NOS:142-178. Examples of altered human Cκ domains are those that facilitate heterodimerization with a CH1 region, but minimize homodimerization with another Cκ domain. Representative altered human Cκ domains are set forth in SEQ ID NOS:160 (N29W V55A T70A), 161 (N29Y V55A T70A), 202 (T70E N29A N30A V55A), 167 (N30R V55A T70A), 168 (N30K V55A T70A), 170 (N30E V55A T70A), 172 (V55R N29A N30A), 175 (N29W N30Y V55A T70E), 176 (N29Y N30Y V55A T70E), 177 (N30E V55A T70E), 178 (N30Y V55A T70E), 770 (N30D V55A T70E), 771 (N30M V55A T70E), 772 (N305 V55A T70E), and 773 (N30F V55A T70E).

[0173] In certain embodiments, in addition to or alternative to the mutations in Ck domains described herein, both the immunoglobulin heterodimerization domains (i.e., immunoglobulin CH1 and CL domains) of a polypeptide heterodimer have mutations so that the resulting heterodimerization domains form salt bridges (i.e., ionic interactions) between the amino acid residues at the mutated sites. For example, the heterodimerization domains of a polypeptide heterodimer may be a mutated CH1 domain in combination with a mutated Ck domain. In the mutated CH1 domain, valine at position 68 (V68) of the wild type human CH1 domain is substituted by an amino acid residue having a negative charge (e.g., asprartate or glutamate), whereas leucine at position 29 (L29) of a mutated human Ck domain in which the first arginine and the last cysteine have been deleted is substituted by an amino acid residue having a positive charge (e.g., lysine, arginine or histidine). The charge-charge interaction between the amino acid residue having a negative charge of the resulting mutated CH 1 domain and the amino acid residue having a positive charge of the resulting mutated Ck domain forms a salt bridge, which stabilizes the heterodimeric interface between the mutated CH1 and Ck domains. Alternatively, V68 of the wild type CH1 may be substituted by an amino acid residue having a positive charge, whereas L29 of a mutated human Ck domain in which the first arginine and the last cysteine have been deleted may be substituted by an amino acid residue having a negative charge. Exemplary mutated CH1 sequences in which V68 is substituted by an amino acid with either a negative or positive charge are set forth in SEQ ID NOS:784 and 785. Exemplary mutated Ck sequences in which L29 is substituted by an amino acid with either a negative or positive charge are set forth in SEQ ID NOS:782 and 783.

[0174] Positions other than V68 of human CH1 domain and L29 of human Ck domain may be substituted with amino acids having opposite charges to produce ionic interactions between the amino acids in addition or alternative to the mutations in V68 of CH1 domain and L29 of Ck domain. Such positions can be identified by any suitable method, including random mutagenesis, analysis of the crystal structure of the CH1-Ck pair to identify amino acid residues at the CH1-Ck interface, and further identifying suitable positions among the amino acid residues at the CH1-Ck interface using a set of criteria (e.g., propensity to engage in ionic interactions, proximity to a potential partner residue, etc.).

[0175] In certain embodiments, polypeptide heterodimers of the present disclosure contain only one pair of immunoglobulin heterodimerization domains. For example, a first chain of a polypeptide heterodimer may comprise a CH1 region as an immunoglobulin heterodimerization domain, while a second chain may comprise a CL domain (e.g., a Cκ or Cλ) as an immunoglobulin heterodimerization domain. Alternatively, a first chain may comprise a CL region (e.g., a Cκ or Cλ) as an immunoglobulin heterodimerization domain, while a second chain may comprise a CH1 region as an immunoglobulin heterodimerization domain. As set forth herein, the immunoglobulin heterodimerization domains of the first and second chains are capable of associating to form a polypeptide heterodimer of this disclosure.

[0176] In certain other embodiments, polypeptide heterodimers of the present disclosure may have two pairs of immunoglobulin heterodimerization domains. For example, a first chain of a polypeptide heterodimer may comprise two CH1 regions, while a second chain may have two CL domains that associate with the two CH1 regions in the first chain. Alternatively, a first chain may comprise two CL domains, while a second chain may have two CH1 regions that associate with the two CL domains in the first chain. In certain embodiments, a first chain polypeptide comprises a CH1 region and a CL domain, while a second chain polypeptide comprises a CL domain and a CH1 region that associate with the CH1 region and the CL domain, respectively, of the first chain polypeptide.

[0177] In the embodiments where a polypeptide heterodimer comprises only one heterodimerization pair (i.e., one immunoglobulin heterodimerization domain in each chain), the immunoglobulin heterodimerization domain of each chain may be located amino terminal to the Fc region portion of that chain. Alternatively, the immunoglobulin heterodimerization domain in each chain may be located carboxyl terminal to the Fc region portion of that chain.

[0178] In the embodiments where a polypeptide heterodimer comprises two heterodimerization pairs (i.e., two immunoglobulin heterodimerization domains in each chain), both immunoglobulin heterodimerization domains in each chain may be located amino terminal to the Fc region portion of that chain. Alternatively, both immunoglobulin heterodimerization domains in each chain may be located carboxyl terminal to the Fc region portion of that chain. In further embodiments, one immunoglobulin heterodimerization domain in each chain may be located amino terminal to the Fc region portion of that chain, while the other immunoglobulin heterodimerization domain of each chain may be located carboxyl terminal to the Fc region portion of that chain. In other words, in those embodiments, the Fc region portion is interposed between the two immunoglobulin heterodimerization domains of each chain.

### Portion of Fc Region

[0179] As indicated herein, polypeptide heterodimers of the present disclosure comprise an Fc region constant domain portion (also referred to as an Fc region portion) in each polypeptide chain. The inclusion of an Fc region portion slows clearance of the heterodimers from circulation after administration to a subject. By mutation or other alteration, the Fc region portion further enables relatively easy modulation of heterodimer polypeptide effector function (e.g., ADCC, ADCP, CDC), which can either be increased or decreased depending on the disease being treated, as is known in the art and described herein.

[0180] An Fc region portion present in single chain polypeptides that form part of the polypeptide heterodimers of the present disclosure may comprise a CH2 domain, a CH3 domain, a CH4 domain or any combination thereof. For example, an Fc region portion may comprise a CH2 domain, a CH3 domain, both CH2 and CH3 domains, both CH3 and CH4 domains, two CH3 domains, a CH4 domain, or two CH4 domains. In certain embodiments, the Fc region portion is an IgG CH2CH3, for instance, a human CH2CH3.

[0181] A CH2 domain that may form an Fc region portion of a single chain polypeptide of a heterodimer of the present disclosure may be a wild type immunoglobulin CH2 domain or an altered immunoglobulin CH2 domain thereof from certain immunoglobulin classes or subclasses (e.g., IgG1, IgG2, IgG3, IgG4, IgA1, IgA2, or IgD) and from various species (including human, mouse, rat, and other mammals).

[0182] In certain embodiments, a CH2 domain is a wild type human immunoglobulin CH2 domain, such as wild type CH2 domains of human IgG1, IgG2, IgG3, IgG4, IgA1, IgA2, or IgD, as set forth in SEQ ID NOS:115, 199-201 and 195-197, respectively. In certain embodiments, the CH2 domain is a wild type human IgG1 CH2 domain as set forth in SEQ ID NO:115.

[0183] In certain embodiments, a CH2 domain is an altered immunoglobulin CH2 region (e.g., an altered human IgG1 CH2 domain) that comprises an amino acid substitution at the asparagine of position 297 (e.g., asparagine to alanine) Such an amino acid substitution reduces or eliminates glycosylation at this site and abrogates efficient Fc binding to FcγR and C1q.

[0184] In certain embodiments, a CH2 domain is an altered immunoglobulin CH2 region (e.g., an altered human IgG1 CH2 domain) that comprises at least one substitution or deletion at positions 234 to 238. For example, an immunoglobulin CH2 region can comprise a substitution at position 234, 235, 236, 237 or 238, positions 234 and 235, positions 234 and 236, positions 234 and 237, positions 234 and 238, positions 234-236, positions 234, 235 and 237, positions 234, 236 and 238, positions 234, 235, 237, and 238, positions 236-238, or any other combination of two, three, four, or five amino acids at positions 234-238. In addition or alternatively, an altered CH2 region may comprise one or more (e.g., about two, three, four or five) amino acid deletions at positions 234-238, for instance a deletion at one of position 236 or position 237 while the other position is substituted. The above-noted mutation(s) decrease or eliminate the antibody-dependent cell-mediated cytotoxicity (ADCC) activity or Fc receptor-binding capability of a polypeptide heterodimer that comprises the altered CH2 domain. In certain embodiments, the amino acid residues at one or more of positions 234-238 has been replaced with one or more alanine residues. In further embodiments, only one of the amino acid residues at positions 234-238 have been deleted while one or more of the remaining amino acids at positions 234-238 can be substituted with another amino acid (e.g., alanine or serine).

[0185] In certain other embodiments, a CH2 domain is an altered immunoglobulin CH2 region (e.g., an altered human IgG1 CH2 domain) that comprises one or more amino acid substitutions at positions 253, 310, 318, 320, 322, and 331. For example, an immunoglobulin CH2 region can comprise a substitution at position 253, 310, 318, 320, 322, or 331, positions 318 and 320, positions 318 and 322, positions 318, 320 and 322, or any other combination of two, three, four, five or six amino acids at positions 253, 310, 318, 320, 322, and 331. The above-noted mutation(s) decrease or eliminate the complement-dependent cytotoxicity (CDC) of a polypeptide heterodimer that comprises the altered CH2 domain.

[0186] In certain other embodiments, in addition to the amino acid substitution at position 297, an altered CH2 region (e.g., an altered human IgG1 CH2 domain) can further comprise one or more (e.g., two, three, four, or five) additional substitutions at positions 234-238. For example, an immunoglobulin CH2 region can comprise a substitution at positions 234 and 297, positions 234, 235, and 297, positions 234, 236 and 297, positions 234-236 and 297, positions 234, 235, 237 and 297, positions 234, 236, 238 and 297, positions 234, 235, 237, 238 and 297, positions 236-238 and 297, or any combination of two, three, four, or five amino acids at positions 234-238 in addition to position 297. In addition or alternatively, an altered CH2 region may comprise one or more (e.g., two, three, four or five) amino acid deletions at positions 234-238, such as at position 236 or position 237. The additional mutation(s) decreases or eliminates the antibody-dependent cell-mediated cytotoxicity (ADCC) activity or Fc receptor-binding capability of a polypeptide heterodimer that comprises the altered CH2 domain. In certain embodiments, the amino acid residues at one or more of positions 234-238 have been replaced with one or more alanine residues. In further embodiments, only one of the amino acid residues at positions 234-238 has been deleted while one or more of the remaining amino acids at positions 234-238 can be substituted with another amino acid (e.g., alanine or serine).

[0187] In certain embodiments, in addition to one or more (e.g., about 2, 3, 4,or 5) amino acid substitutions at positions 234-238, a mutated CH2 region (e.g., an altered human IgG1 CH2 domain) in a fusion protein of the present disclosure may contain one or more (e.g., 2, 3, 4, 5, or 6) additional amino acid substitutions (e.g., substituted with alanine) at one or more positions involved in complement fixation (e.g., at positions 1253, H310, E318, K320, K322, or P331). Mutated immunoglobulin CH2 regions can include human IgG1, IgG2, IgG4 and mouse IgG2a CH2 regions with alanine substitutions at positions 234, 235, 237 (if present), 318, 320 and 322.

[0188] In still further embodiments, in addition to the amino acid substitution at position 297 and the additional deletion(s) or substitution(s) at positions 234-238, an altered CH2 region (e.g., an altered human IgG1 CH2 domain) can further comprise one or more (e.g., two, three, four, five, or six) additional substitutions at positions 253, 310, 318, 320, 322, and 331. For example, an immunoglobulin CH2 region can comprise a (1) substitution at position 297, (2) one or more substitutions or deletions or a combination thereof at positions 234-238, and one or more (e.g., 2, 3, 4, 5, or 6) amino acid substitutions at positions 1253, H310, E318, K320, K322, and P331, such as one, two, three substitutions at positions E318, K320 and K322. For instance, the amino acids at the above-noted positions are substituted by alanine or serine.

[0189] In certain embodiments, an immunoglobulin CH2 region polypeptide comprises: (i) an amino acid substitution at the asparagines of position 297 and one amino acid substitution at position 234, 235, 236 or 237; (ii) an amino acid substitution at the asparagine of position 297 and amino acid substitutions at two of positions 234-237; (iii) an amino acid substitution at the asparagine of position 297 and amino acid substitutions at three of positions 234-237; (iv) an amino acid substitution at the asparagine of position 297, amino acid substitutions at positions 234, 235 and 237, and an amino acid deletion at position 236; (v) amino acid substitutions at three of positions 234-237 and amino acid substitutions at positions 318, 320 and 322; or (vi) amino acid substitutions at three of positions 234-237, an amino acid deletion at position 236, and amino acid substitutions at positions 318, 320 and 322.

[0190] Exemplary altered immunoglobulin CH2 regions with amino acid substitutions at the asparagine of position 297 include: human IgG1 CH2 region with alanine substitutions at L234, L235, G237 and N297 and a deletion at G236, human IgG2 CH2 region with alanine substitutions at V234, G236, and N297, human IgG4 CH2 region with alanine substitutions at F234, L235, G237 and N297 and a deletion of G236, human IgG4 CH2 region with alanine substitutions at F234 and N297, human IgG4 CH2 region with alanine substitutions at L235 and N297, human IgG4 CH2 region with alanine substitutions at G236 and N297, and human IgG4 CH2 region with alanine substitutions at G237 and N297.

[0191] In certain embodiments, in addition to the amino acid substitutions described above, an altered CH2 region may contain one or more additional amino acid substitutions at one or more positions other than the above-noted positions. Such amino acid substitutions may be conservative or non-conservative amino acid substitutions. For example, in certain embodiments, P233 may be changed to E233 in an altered IgG2 CH2 region. In addition or alternatively, in certain embodiments, the altered CH2 region may contain one or more amino acid insertions, deletions, or both. The insertion(s), deletion(s) or substitution(s) may anywhere in an immunoglobulin CH2 region, such as at the N- or C-terminus of a wild type immunoglobulin CH2 region resulting from linking the CH2 region with another region (e.g., a binding domain or an immunoglobulin heterodimerization domain) via a hinge.

[0192] In certain embodiments, an altered CH2 region in a polypeptide heterodimer of the present disclosure comprises or is a sequence that is at least 90%, at least 91%, at least 92%, at least 93%, at least 94%, at least 95%, at least 96%, at least 97%, at least 98%, at least 99% identical to a wild type immunoglobulin CH2 region, such as the CH2 region of wild type human IgG1, IgG2, or IgG4, or mouse IgG2a (e.g., IGHG2c).

[0193] An altered immunoglobulin CH2 region in a polypeptide heterodimer of the present disclosure may be derived from a CH2 region of various immunoglobulin isotypes, such as IgG1, IgG2, IgG3, IgG4, IgA1, IgA2, and IgD, from various species (including human, mouse, rat, and other mammals). In certain embodiments, an altered immunoglobulin CH2 region in a fusion protein of the present disclosure may be derived from a CH2 region of human IgG1, IgG2 or IgG4, or mouse IgG2a (e.g., IGHG2c).

[0194] In certain embodiments, an altered CH2 domain is a human IgG1 CH2 domain with alanine substitutions at positions 235, 318, 320, and 322 (i.e., a human IgG1 CH2 domain with L235A, E318A, K320A and K322A substitutions) (SEQ ID NO:595), and optionally an N297 mutation (e.g., to alanine) In certain other embodiments, an altered CH2 domain is a human IgG1 CH2 domain with alanine substitutions at positions 234, 235, 237, 318, 320 and 322 (i.e., a human IgG1 CH2 domain with L234A, L235A, G237A, E318A, K320A and K322A substitutions) (SEQ ID NO:596), and optionally an N297 mutation (e.g., to alanine)

[0195] In certain embodiments, an altered CH2 domain is an altered human IgG1 CH2 domain with mutations known in the art that enhance immunological activities such as ADCC, ADCP, CDC, complement fixation, Fc receptor binding, or any combination thereof

[0196] The CH3 domain that may form an Fc region portion of a single chain polypeptide of a heterodimer of the present disclosure may be a wild type immunoglobulin CH3 domain or an altered immunoglobulin CH3 domain thereof from certain immunoglobulin classes or subclasses (e.g., IgG1, IgG2, IgG3, IgG4, IgA1, IgA2, IgD, IgE, IgM) of various species (including human, mouse, rat, and other mammals). In certain embodiments, a CH3 domain is a wild type human immunoglobulin CH3 domain, such as wild type CH3 domains of human IgG1, IgG2, IgG3, IgG4, IgA1, IgA2, IgD, IgE, or IgM as set forth in SEQ ID NOS:116, 208-210, 204-207, and 212, respectively. In certain embodiments, the CH3 domain is a wild type human IgG1 CH3 domain as set forth in SEQ ID NO:116. In certain embodiments, a CH3 domain is an altered human immunoglobulin CH3 domain, such as an altered CH3 domain based on or derived from a wild-type CH3 domain of human IgG1, IgG2, IgG3, IgG4, IgA1, IgA2, IgD, IgE, or IgM antibodies. For example, an altered CH3 domain may be a human IgG1 CH3 domain with one or two mutations at positions H433 and N434 (positions are numbered according to EU numbering). The mutations in such positions may be involved in complement fixation. In certain other embodiments, an altered CH3 domain may be a human IgG1 CH3 domain but with one or two amino acid substitutions at position F405 or Y407. The amino acids at such positions are involved in interacting with another CH3 domain. In certain embodiments, an altered CH3 domain may be an altered human IgG1 CH3 domain with its last lysine deleted. The sequence of this altered CH3 doamin is set forth in SEQ ID NO:794.

[0197] In certain embodiments, a polypeptide heterodimer comprises a CH3 pair that comprises so called “knobs-into-holes” mutations (see, Marvin and Zhu, Acta Pharmacologica Sinica 26:649-58, 2005; Ridgway et al., Protein Engineering 9:617-21, 1966). More specifically, mutations may be introduced into each of the two CH3 domains so that the steric complementarity required for CH3/CH3 association obligates these two CH3 domains to pair with each other. For example, a CH3 domain in one single chain polypeptide of a polypeptide heterodimer may contain a T366W mutation (a “knob” mutation, which substitutes a small amino acid with a larger one), and a CH3 domain in the other single chain polypeptide of the polypeptide heterodimer may contain a Y407A mutation (a “hole” mutation, which substitutes a large amino acid with a smaller one). Other exemplary knobs-into-holes mutations include (1) a T366Y mutation in one CH3 domain and a Y407T in the other CH3 domain, and (2) a T366W mutation in one CH3 domain and T366S, L368A and Y407V mutations in the other CH3 domain.

[0198] The CH4 domain that may form an Fc region portion of a single chain polypeptide of a heterodimer of the present disclosure may be a wild type immunoglobulin CH4 domain or an altered immunoglobulin CH4 domain thereof from IgE or IgM molecules. In certain embodiments, the CH4 domain is a wild type human immunoglobulin CH4 domain, such as wild type CH4 domains of human IgE and IgM molecules as set forth in SEQ ID NOS:213 and 214, respectively.

[0199] In certain embodiments, a CH4 domain is an altered human immunoglobulin CH4 domain, such as an altered CH4 domain based on or derived from a CH4 domain of human IgE or IgM molecules, which have mutations that increase or decrease an immunological activity known to be associated with an IgE or IgM Fc region.

[0200] In certain embodiments, an Fc region constant domain portion in heterodimers of the present disclosure comprises a combination of CH2, CH3 or CH4 domains (i.e., more than one constant sub-domain selected from CH2, CH3 and CH4). For example, the Fc region portion may comprise CH2 and CH3 domains or CH3 and CH4 domains. In certain other embodiments, the Fc region portion may comprise two CH3 domains and no CH2 or CH4 domains (i.e., only two or more CH3). The multiple constant sub-domains that form an Fc region portion may be based on or derived from the same immunoglobulin molecule, or the same class or subclass immunoglobulin molecules.

[0201] Alternatively, the multiple constant sub-domains may be based on or derived from different immunoglobulin molecules, or different classes or subclasses immunoglobulin molecules. For example, in certain embodiments, an Fc region portion comprises both human IgM CH3 domain and human IgG1 CH3 domain. The multiple constant sub-domains that form an Fc region portion may be directly linked together or may be linked to each other via one or more (e.g., 2-8) amino acids.

[0202] Exemplary Fc region portions are set forth in SEQ ID NOS:795 and 882-889.

[0203] In certain embodiments, an Fc constant domain region portion comprises a wild type human IgG1 CH2 domain and a wild type human IgG1 CH3 domain. In certain other embodiments, an Fc region portion comprises an altered human IgG1 CH2 domain (e.g., having an amino acid mutation at N297 or having at least one additional amino acid mutation at positions 234-238 or having amino acid mutations at positions 234, 235, 237, 318, 320 and 322) and a wild type human CH3 domain, so that the Fc region portion of a heterodimer of this disclosure does not promote immunological activities, such as ADCC, ADCP, CDC, Fc receptor binding, or any combination thereof. In other embodiments, an altered human IgG1 CH2 domain can have mutations known in the art to enhance immunological activities, such as ADCC, ADCP, CDC, Fc receptor binding, or any combination thereof. In certain other embodiments, an Fc region portion comprises a wild type human IgM CH3 domain and a wild type human IgM CH4 domain, or a wild type human IgE CH3 domain and a wild type human IgE CH4 domain.

[0204] In certain embodiments, the Fc region portions of both single chain polypeptides of a polypeptide heterodimer are identical to each other. In certain other embodiments, the Fc region portion of one single chain polypeptide of a polypeptide heterodimer is different from the Fc region portion of the other single chain polypeptide of the heterodimer. For example, one Fc region portion may contain a CH3 domain with a “knob” mutation, whereas the other Fc region portion may contain a CH3 domain with a “hole” mutation.

### Hinge

[0205] A hinge region contained in a single chain polypeptide of a polypeptide heterodimer according to the present disclosure may be located (a) immediately amino terminal to an Fc region portion (e.g., depending on the isotype, amino terminal to a CH2 domain wherein the Fc region portion is a CH2CH3, or amino terminal to a CH3 domain wherein the Fc region portion is a CH3CH4), (b) interposed between and connecting a binding domain (e.g., scFv) and an immunoglobulin heterodimerization domain, (c) interposed between and connecting an immunoglobulin heterodimerization domain and an Fc region portion (e.g., wherein the Fc region portion is a CH2CH3 or a CH3CH4, depending on the isotype or isotypes), (d) interposed between and connecting an Fc region portion and a binding domain, (e) at the amino terminus of the single chain polypeptide, or (f) at the carboxyl terminus of the single chain polypeptide. The single chain polypeptide comprising a hinge region as described herein will be capable of associating with a different single chain fusion polypeptide to form a polypeptide heterodimer provided herein, and the polypeptide heterodimer formed will contain a binding domain that retains its target specificity or its specific target binding affinity.

[0206] In certain embodiments, a hinge present in a single chain polypeptide that forms a polypeptide heterodimer with another single chain polypeptide may be an immunoglobulin hinge region, such as a wild type immunoglobulin hinge region or an altered immunoglobulin hinge region thereof

[0207] In certain embodiments, a hinge is a wild type human immunoglobulin hinge region (e.g., human immunoglobulin hinge regions as set forth in SEQ ID NOS:215-221). In certain other embodiments, one or more amino acid residues may be added at the amino- or carboxy-terminus of a wild type immunoglobulin hinge region as part of a fusion protein construct design. For example, additional junction amino acid residues at the hinge amino-terminus can be “RT,” “RSS,” “TG,” or “T”, or at the hinge carboxy-terminus can be “SG”, or a hinge deletion can be combined with an addition, such as ΔP with “SG” added at the carboxyl terminus.

[0208] In certain embodiments, a hinge is an altered immunoglobulin hinge in which one or more cysteine residues in a wild type immunoglobulin hinge region is substituted with one or more other amino acid residues (e.g., serine or alanine) For example, a hinge may be an altered immunoglobulin hinge based on or derived from a wild type human IgG1 hinge as set forth in SEQ ID NO:218, which from amino terminus to carboxyl terminus comprises the upper hinge region (EPKSCDKTHT, SEQ ID NO:227) and the core hinge region (CPPCP, SEQ ID NO:228). Exemplary altered immunoglobulin hinges include an immunoglobulin human IgG1 hinge region having one, two or three cysteine residues found in a wild type human IgG1 hinge substituted by one, two or three different amino acid residues (e.g., serine or alanine) An altered immunoglobulin hinge may additionally have a proline substituted with another amino acid (e.g., serine or alanine) For example, the above-described altered human IgG1 hinge may additionally have a proline located carboxyl terminal to the three cysteines of wild type human IgG1 hinge region substituted by another amino acid residue (e.g., serine, alanine) In one embodiment, the prolines of the core hinge region are not substituted. Exemplary altered immunoglobulin hinges are set forth in SEQ ID NOS: 229-240, 255, 664-677, and 748-759. An example of an altered IgG1 hinge is an altered human IgG1 hinge in which the first cysteine is substituted by serine. The sequence of this altered IgG1 hinge is set forth in SEQ ID NO:664, and is referred to as the “ human IgG1 SCC-P hinge” or “SCC-P hinge.” In certain embodiments, one or more amino acid residues (e.g., “RT,” “RSS,” or “T”) may be added at the amino-or carboxy-terminus of a mutated immunoglobulin hinge region as part of a fusion protein construct design.

[0209] In certain embodiments, a hinge polypeptide comprises or is a sequence that is at least 80%, at least 81%, at least 82%, at least 83%, at least 84%, at least 85%, at least 86%, at least 87%, at least 88%, at least 89%, at least 90%, at least 91%, at least 92%, at least 93%, at least 94%, at least 95%, at least 96%, at least 97%, at least 98%, at least 99% identical to a wild type immunoglobulin hinge region, such as a wild type human IgG1 hinge, a wild type human IgG2 hinge, or a wild type human IgG4 hinge.

[0210] In further embodiments, a hinge present in a single chain polypeptide that forms a polypeptide heterodimer with another single chain polypeptide may be a hinge that is not based on or derived from an immunoglobulin hinge (i.e., not a wild type immunoglobulin hinge or an altered immunoglobulin hinge). These types of non-immunoglobulin based hinges can be used on or near the carboxyl end (e.g., located carboxyl terminal to Fc region portions) of the single chain polypeptides that form the polypeptide heterodimers. Examples for such hinges include peptides of about five to about 150 amino acids of the interdomain or stalk region of type II C-lectins or CD molecules, for instance, peptides of about eight to 25 amino acids and peptides of about seven to 18 amino acids, and derivatives thereof

[0211] The “interdomain or stalk region” of a type II C-lectin or CD molecule refers to the portion of the extracellular domain of the type II C-lectin or CD molecule that is located between the C-type lectin-like domain (CTLD; e.g., similar to CTLD of natural killer cell receptors) and the transmembrane domain. For example, in the human CD94 molecule (GenBank Accession No. AAC50291.1, PRI Nov. 30, 1995), the extracellular domain corresponds to amino acid residues 34-179, whereas the CTLD corresponds to amino acid residues 61-176. Accordingly, the interdomain or stalk region of the human CD94 molecule includes amino acid residues 34-60, which is found between the membrane and the CTLD (see Boyington et al., Immunity 10:75, 1999; for descriptions of other stalk regions, see also Beavil et al., Proc. Nat'l. Acad. Sci. USA 89:753, 1992; and Figdor et al., Nature Rev. Immunol. 2:77, 2002). These type II C-lectin or CD molecules may also have from six to 10 junction amino acids between the stalk region and the transmembrane region or the CTLD. In another example, the 233 amino acid human NKG2A protein (GenBank Accession No. P26715.1, PRI Jun. 15, 2010) has a transmembrane domain ranging from amino acids 71-93 and an extracellular domain ranging from amino acids 94-233. The CTLD is comprised of amino acids 119-231, and the stalk region comprises amino acids 99-116, which is flanked by junctions of five and two amino acids. Other type II C-lectin or CD molecules, as well as their extracellular ligand-bind domains, interdoamin or stalking regions, and CTLDs are known in the art (see, e.g., GenBank Accession Nos. NP_{—}001993.2; AAH07037.1, PRI Jul. 15, 2006; NP_{—}001773.1, PRI Jun. 20, 1010; AAL65234.1, PRI Jan. 17, 2002, and CAA04925.1, PRI Nov. 14, 2006, for the sequences of human CD23, CD69, CD72, NKG2A and NKG2D and their descriptions, respectively).

[0212] A “derivative” of an interdomain or stalk region, or fragment thereof, of a type II C-lectin or CD molecule includes an about an eight to about 150 amino acid sequence in which one, two, or three amino acids of the stalk region of a wild type type II C-lectin or CD molecule have a deletion, insertion, substitution, or any combination thereof. For instance, a derivative can comprise one or more amino acid substitutions and/or an amino acid deletion. In certain embodiments, a derivative of an interdomain or stalk region is more resistant to proteolytic cleavage as compared to the wild-type interdomain or stalk region sequence, such as those derived from about eight to about 20 amino acids of NKG2A, NKG2D, CD23, CD64, CD72, or CD94.

[0213] In certain embodiments, interdomain or stalk region hinges may comprise about seven to 18 amino acids and can form an a-helical coiled coil structure. In certain embodiments, interdomain or stalk region hinges contain about 0, 1, 2, 3, or 4 cysteines. Exemplary interdomain or stalk region hinges are peptide fragments of the interdomain or stalk regions, such as ten to 150 amino acid fragments from the stalk regions of CD69, CD72, CD94, NKG2A and NKG2D, as set forth in SEQ ID NOS:125, 241-244, 601, and 716. Additional exemplary stalk region or interdomain hinges include those as set forth in SEQ ID NOS:734-737, 742-747, 799-823, and 825.

[0214] Alternative hinges that can be used in single chain polypeptides of polypeptide heterodimers are from portions of cell surface receptors (interdomain regions) that connect immunoglobulin V-like or immunoglobulin C-like domains. Regions between Ig V-like domains where the cell surface receptor contains multiple Ig V-like domains in tandem and between Ig C-like domains where the cell surface receptor contains multiple tandem Ig C-like regions are also contemplated as hinges useful in single chain polypeptides of polypeptide heterodimers. In certain embodiments, hinge sequences comprised of cell surface receptor interdomain regions may further contain a naturally occurring or added motif, such as an IgG core hinge sequence that confers one or more disulfide bonds to stabilize the polypeptide heterodimer formation. Examples of hinges include interdomain regions between the Ig V-like and Ig C-like regions of CD2, CD4, CD22, CD33, CD48, CD58, CD66, CD80, CD86, CD150, CD166, and CD244.

[0215] In certain embodiments, hinge sequences have about 5 to 150 amino acids, 5 to 10 amino acids, 10 to 20 amino acids, 20 to 30 amino acids, 30 to 40 amino acids, 40 to 50 amino acids, 50 to 60 amino acids, 5 to 60 amino acids, 5 to 40 amino acids, for instance, about 8 to 20 amino acids and about 10 to 15 amino acids. The hinges may be primarily flexible, but may also provide more rigid characteristics or may contain primarily α-helical structure with minimal β-sheet structure. The lengths or the sequences of the hinges may affect the binding affinities of the binding domains to which the hinges are directly or indirectly (via another region or domain, such as an immunoglobulin heterodimerization domain) connected as well as one or more activities of the Fc region portions to which the hinges are directly or indirectly connected.

[0216] In one embodiment, hinge sequences are stable in plasma and serum and are resistant to proteolytic cleavage. The first lysine in the IgG1 upper hinge region may be mutated to minimize proteolytic cleavage, for instance, the lysine may be substituted with methionine, threonine, alanine or glycine, or may be deleted (see, e.g., SEQ ID NOS:826-881, which may include junction amino acids at the amino terminus such as RT).

[0217] In some embodiments, hinge sequences may contain a naturally occurring or added motif such as an immunoglobulin hinge core structure CPPCP (SEQ ID NO:228) that confers the capacity to form a disulfide bond or multiple disulfide bonds to stabilize the carboxy-terminus of a molecule. In other embodiments, hinge sequences may contain one or more glycosylation sites.

[0218] Exemplary hinges, including altered immunoglobulin hinges, are set forth in SEQ ID NOS:618-749 and 796-881.

[0219] In certain embodiments where a single chain polypeptide of a polypeptide heterodimer comprises a binding domain at or near its carboxyl terminus, a hinge may be present to link the binding domain with another portion of the single chain polypeptide (e.g., an Fc region portion or an immunoglobulin heterodimerization domain). Such a hinge may be a non-immunoglobulin hinge (i.e., a hinge not based on or derived from a wild type immunoglobulin hinge), a stalk region of a type II C-lectin or CD molecule, an interdomain region that connect IgV-like or IgC-like domains of a cell surface receptor, or a derivative or functional variant thereof. Exemplary carboxyl terminal hinges, sometimes referred to as “back-end” hinges, includes those set forth in SEQ ID NOS:734-737, 742-747, 799-823, and 825.

[0220] In certain embodiments, a hinge of one single chain polypeptide of a polypeptide heterodimer is identical to a corresponding hinge of the other single chain polypeptide of the heterodimer. In certain other embodiments, a hinge of one chain is different from that of the other chain (in their length or sequence).

### Other Components or Modifications

[0221] In certain embodiments, a single chain polypeptide that forms a heterodimer with another single chain polypeptide may contain one or more additional domains or regions. Such additional regions may be a leader sequence (also referred to as “signal peptide”) at the amino-terminus for secretion of an expressed single chain polypeptide. Exemplary leader peptides of this disclosure include natural leader sequences or others, such as those as set forth in SEQ ID NOS:110 and 111.

[0222] Additional regions may also be sequences at the carboxy-terminus for identifying or purifying single chain polypeptides (e.g., epitope tags for detection or purification, such as a histidine tag, biotin, a FLAG® epitope, or any combination thereof).

[0223] Further optional regions may be additional amino acid residues (referred to as “junction amino acids” or “junction amino acid residues”) having a length of one to about 5 amino acids, which result from use of specific expression systems or construct design for the single chain polypeptides of the present disclosure. Such additional amino acid residues (for instance, one, two, three, four or five additional amino acids) may be present at the amino or carboxyl terminus or between various regions or domains of a single chain polypeptide, such as between a binding domain and an immunoglobulin heterodimerization domain, between an immunoglobulin heterodimerization domain and a hinge, between a hinge and an Fc region portion, between domains of an Fc region portion (e.g., between CH2 and CH3 domains or between two CH3 domains), between a binding domain and a hinge, between an Fc region portion and an immunoglobulin heterodimerization domain, or between a variable domain and a linker. Exemplary junction amino acids amino-terminal to a hinge include RDQ (SEQ ID NO:598), RT, SS, SASS (SEQ ID NO:599) and SSS (SEQ ID NO:600). Exemplary junction amino acids carboxy-terminal to a hinge include amino acids SG. Additional exemplary junction amino acids include SR.

[0224] In certain embodiments, junction amino acids are present between an Fc region portion that comprises CH2 and CH3 domains and an immunoglobulin heterodimerization domain (CH1 or CL). These junction amino acids are also referred to as a “linker between CH3 and CH1 or CL” if they are present between the C-terminus of CH3 and the N-terminus of CH1 or CL. Such a linker may be 2-10 amino acids in length. In certain embodiments, the Fc region portion comprises human IgG1 CH2 and CH3 domains in which the C-terminal lysine residue of human IgG1 CH3 is deleted. Exemplary linkers between CH3 and CH1 include those set forth in SEQ ID NO:788-790. Exemplary linkers between CH3 and Ck include those set forth in SEQ ID NOS:791-793 (in which the carboxyl terminal arginine in the linkers may alternatively be regarded as the first arginine of Ck). In certain embodiments, the presence of such linkers or linker pairs (e.g., SEQ ID NO:788 as a CH3-CH1 linker in one single chain polypeptide of a heterodimer and SEQ ID NO:791 as a CH3-Ck linker in the other single chain polypeptide of the heterodimer; SEQ ID NO:789 as a CH3-CH1 linker and SEQ ID NO:792 as a CH3-Ck linker; and SEQ ID NO:790 as a CH3-CH1 linker and SEQ ID NO:793 as a CH3-Ck linker) improves the production of heterodimer compared the presence of a reference linker as set forth in SEQ ID NO:787 (in which the last lysine of CH3 is included as part of the linker) in both single chain polypeptides of a heterodimer.

[0225] In certain embodiments, an immunoglobulin Fc region (e.g., CH2, CH3, and/or CH4 regions) of a polypeptide heterodimer of the present disclosure may have an altered glycosylation pattern relative to an immunoglobulin reference sequence. For example, any of a variety of genetic techniques may be employed to alter one or more particular amino acid residues that form a glycosylation site (see Co et al. (1993) Mol. Immunol. 30:1361; Jacquemon et al. (2006) J. Thromb. Haemost. 4:1047; Schuster et al. (2005) Cancer Res. 65:7934; Warnock et al. (2005) Biotechnol. Bioeng. 92:831), such as N297 of the CH2 domain (EU numbering). Alternatively, the host cells producing polypeptide heterodimers of this disclosure may be engineered to produce an altered glycosylation pattern. One method known in the art, for example, provides altered glycosylation in the form of bisected, non-fucosylated variants that increase ADCC. The variants result from expression in a host cell containing an oligosaccharide-modifying enzyme. Alternatively, the Potelligent technology of BioWa/Kyowa Hakko is contemplated to reduce the fucose content of glycosylated molecules according to this disclosure. In one known method, a CHO host cell for recombinant immunoglobulin production is provided that modifies the glycosylation pattern of the immunoglobulin Fc region, through production of GDP-fucose.

[0226] Alternatively, chemical techniques are used to alter the glycosylation pattern of polypeptide heterodimers of this disclosure. For example, a variety of glycosidase and/or mannosidase inhibitors provide one or more of desired effects of increasing ADCC activity, increasing Fc receptor binding, and altering glycosylation pattern. In certain embodiments, cells expressing polypeptide heterodimers of the instant disclosure are grown in a culture medium comprising a carbohydrate modifier at a concentration that increases the ADCC of immunoglycoprotein molecules produced by said host cell, wherein said carbohydrate modifier is at a concentration of less than 800 μM. In one embodiment, the cells expressing these polypeptide heterodimers are grown in a culture medium comprising castanospermine or kifunensine, for instance, castanospermine at a concentration of about 100-800 μM, such as 100 μM, 200 μM, 300 μM, 400 μM, 500 μM, 600 μM, 700 μM, or 800 μM. Methods for altering glycosylation with a carbohydrate modifier such as castanospermine are provided in U.S. Pat. No. 7,846,434 or PCT Publication No. WO 2008/052030.

### Structural Arrangements

[0227] As described herein, a polypeptide heterodimer of the present disclosure is formed at least substantially via the interaction between the immunoglobulin heterodimerization domains of two different single chain polypeptides. For example, a first single chain polypeptide can comprise a binding domain that specifically binds a target, a hinge, a first immunoglobulin heterodimerization domain, and an Fc region portion, whereas a second single chain polypeptide can comprise a hinge, a second immunoglobulin heterodimerization domain that is different from the first immunoglobulin heterodimerization domain, and an Fc region portion but will lack a binding domain. To form a heterodimer comprising a single binding domain, the two single chain polypeptides are designed so that the first immunoglobulin heterodimerization domain of the first single chain polypeptide is properly aligned and interacts with the second immunoglobulin heterodimerization domain of the second single chain polypeptide. In addition to the interaction between the two immunoglobulin heterodimerization domains, in certain embodiments, an Fc region portion (e.g., a CH3 domain) in the first chain may interact with an identical portion of an Fc region in the second chain to facilitate heterodimerization. Moreover, in certain embodiments, the hinge in the first chain (e.g., an altered human IgG1 hinge with two cysteine residues as set forth in SEQ ID NO:229) may interact with the hinge in the second chain (e.g., the same altered human IgG1 hinge as set forth in SEQ ID NO:229) to form, for example, disulfide bonds, which may further facilitate or strengthen the interaction between the first and second single chain polypeptides to form a polypeptide heterodimer of the present disclosure.

[0228] A description of how various components can be arranged to make first and second polypeptides that form polypeptide heterodimers of the present disclosure is provided herein. In all the following exemplary arrangements, hinges of both the first and second single chain polypeptides are located amino terminal to the Fc region portion in those single chain polypeptides (although as described above, one or a few junction amino acids may be present between a hinge and an Fc region portion). However, it is contemplated that in certain embodiments, hinges of both the first and second single chain polypeptides may be located between the immunoglobulin heterodimerization domain and the Fc region portion. It is also contemplated that in certain embodiments the hinge of the first single chain polypeptide will be located between the binding domain and the first immunoglobulin heterodimerization domain, and the hinge of the second single chain polypeptide will be connected to the amino terminus of the second immunoglobulin heterodimerization domain in the same orientation as the hinge of the first single chain polypeptide. For example, if the hinge of the first single chain polypeptide is located amino terminal to the first immunoglobulin heterodimerization domain, then the hinge of the second single chain polypeptide will also be located amino terminal to the second immunoglobulin heterodimerization domain. Similarly, if the hinge of the first single chain polypeptide is located carboxyl terminal to the first immunoglobulin heterodimerization domain, then the hinge of the second single chain polypeptide will also be located carboxyl terminal to the second immunoglobulin heterodimerization domain.

[0229] In the following exemplary arrangements, hinges of the first and second single chain polypeptides are immunoglobulin hinges. However, it is contemplated that in certain embodiments, hinges of the first and second single chain polypeptides may be hinges that are not derived from immunoglobulin hinges, such as lectin interdomain regions or cluster of differentiation molecule stalk regions as described herein.

[0230] In one embodiment, a polypeptide heterodimer comprises the following two single chain polypeptides: from amino terminus to carboxyl terminus, a first or long single chain polypeptide comprising a binding domain, a CH1 region, an immunoglobulin hinge, and an Fc region portion; and a second or short single chain polypeptide comprising a CL region (e.g., Cκ, Cλ), an immunoglobulin hinge, and an Fc region portion.

[0231] In another embodiment, a polypeptide heterodimer comprises the following two single chain polypeptides: from amino terminus to carboxyl terminus, a first or long single chain polypeptide comprising a binding domain, an immunoglobulin hinge, an Fc region portion, and a CH1 region; and a second or short single chain polypeptide comprising an immunoglobulin hinge, an Fc region portion, and a CL region.

[0232] In another embodiment, a polypeptide heterodimer comprises the following two single chain polypeptides: from amino terminus to carboxyl terminus, a first or long single chain polypeptide comprising a binding domain, a CH1 region, an immunoglobulin hinge, an Fc region portion, and a second CH1 region: and a second single chain polypeptide comprising a CL region, an immunoglobulin hinge, an Fc region portion, and a second CL region.

[0233] In another embodiment, a polypeptide heterodimer comprises the following two single chain polypeptides: from amino terminus to carboxyl terminus, a first single chain polypeptide comprising a binding domain, a CH1 region, a second CH1 region, an immunoglobulin hinge, and an Fc region portion; and a second single chain polypeptide comprising a CL region, a second CL region, an immunoglobulin hinge and an Fc region portion.

[0234] In another embodiment, a polypeptide heterodimer comprises the following two single chain polypeptides: from amino terminus to carboxyl terminus, a first single chain polypeptide comprising a binding domain, an immunoglobulin hinge, an Fc region portion, a CH1 region, and a second CH1 region; and a second single chain polypeptide comprising an immunoglobulin hinge, an Fc region portion, a CL region and a second CL region.

[0235] In another embodiment, a polypeptide heterodimer comprises the following two single chain polypeptides: from amino terminus to carboxyl terminus, a first single chain polypeptide comprising a CH1 region, an immunoglobulin hinge, an Fc region portion and a binding domain; and a second single chain polypeptide comprising a CL region, an immunoglobulin hinge, and an Fc region portion.

[0236] In another embodiment, a polypeptide heterodimer is formed from the following two single chain polypeptides: from amino terminus to carboxyl terminus, a first single chain polypeptide comprising an immunoglobulin hinge, an Fc region portion, a CH1 region, and a binding domain; and a second single chain polypeptide comprising an immunoglobulin hinge, an Fc region portion, and a CL region.

[0237] In another embodiment, a polypeptide heterodimer comprises the following two single chain polypeptides: from amino terminus to carboxyl terminus, a first single chain polypeptide comprising a CH1 region, an immunoglobulin hinge, an

[0238] Fc region portion, a second CH1 region, and a binding domain; and a second single chain polypeptide comprising a CL region, an immunoglobulin hinge, an Fc region portion, and a second CL region.

[0239] In another embodiment, a polypeptide heterodimer comprises the following two single chain polypeptides: from amino terminus to carboxyl terminus, a first single chain polypeptide comprising a CH1 region, a second CH1 region, an immunoglobulin hinge, an Fc region portion, and a binding domain; and a second single chain polypeptide comprising a CL region, a second CL region, an immunoglobulin hinge and an Fc region portion.

[0240] In another embodiment, a polypeptide heterodimer comprises the following two single chain polypeptides: from amino terminus to carboxyl terminus, a first single chain polypeptide comprising an immunoglobulin hinge, an Fc region portion, a CH1 region, a second CH1 region, and a binding domain; and a second single chain polypeptide comprising an immunoglobulin hinge, an Fc region portion, a CL region and a second CL region.

[0241] In another embodiment, a polypeptide heterodimer comprises the following two single chain polypeptides: from amino terminus to carboxyl terminus, a first single chain polypeptide comprising a binding domain, a CL region, an immunoglobulin hinge, and an Fc region portion; and a second single chain polypeptide comprising a CH1 region, an immunoglobulin hinge, and an Fc region portion.

[0242] In another embodiment, a polypeptide heterodimer comprises the following two single chain polypeptides: from amino terminus to carboxyl terminus, a first single chain polypeptide comprising a binding domain, an immunoglobulin hinge, an Fc region portion, and a CL region; and a second single chain polypeptide comprising an immunoglobulin hinge, an Fc region portion, and a CH1 region.

[0243] In another embodiment, a polypeptide heterodimer comprises the following two single chain polypeptides: from amino terminus to carboxyl terminus, a first single chain polypeptide comprising a binding domain, a CL region, an immunoglobulin hinge, an Fc region portion, and a second CL region; and a second single chain polypeptide comprising a CH1 region, an immunoglobulin hinge, an Fc region portion, and a second CH1 region.

[0244] In another embodiment, a polypeptide heterodimer comprises the following two single chain polypeptides: from amino terminus to carboxyl terminus, a first single chain polypeptide comprising a binding domain, a CL region, a second CL region, an immunoglobulin hinge, and an Fc region portion; and a second single chain polypeptide comprising a CH1 region, a second CH1 region, an immunoglobulin hinge, and an Fc region portion.

[0245] In another embodiment, a polypeptide heterodimer comprises the following two single chain polypeptides: from amino terminus to carboxyl terminus, a first single chain polypeptide comprising a binding domain, an immunoglobulin hinge, an Fc region portion, a CL region, and a second CL region; and a second single chain polypeptide comprising an immunoglobulin hinge, an Fc region portion, a CH1 region, and a second CH1 region.

[0246] In another embodiment, a polypeptide heterodimer comprises the following two single chain polypeptides: from amino terminus to carboxyl terminus, a first single chain polypeptide comprising a CL region, an immunoglobulin hinge, an Fc region portion, and a binding domain; and a second single chain polypeptide comprising a CH1 region, an immunoglobulin hinge, and an Fc region portion.

[0247] In another embodiment, a polypeptide heterodimer comprises the following two single chain polypeptides: from amino terminus to carboxyl terminus, a first single chain polypeptide comprising an immunoglobulin hinge, an Fc region portion, a CL region, and a binding domain; and a second single chain polypeptide comprising an immunoglobulin hinge, an Fc region portion, and a CH1 region.

[0248] In another embodiment, a polypeptide heterodimer comprises the following two single chain polypeptides: from amino terminus to carboxyl terminus, a first single chain polypeptide comprising a CL region, an immunoglobulin hinge, an Fc region portion, a second CL region, and a binding domain; and a second single chain polypeptide comprising a CH1 region, an immunoglobulin hinge, an Fc region portion, and a second CH1 region.

[0249] In another embodiment, a polypeptide heterodimer comprises the following two single chain polypeptides: from amino terminus to carboxyl terminus, a first single chain polypeptide comprising a CL region, a second CL region, an immunoglobulin hinge, an Fc region portion, and a binding domain; and a second single chain polypeptide comprising a CH1 region, a second CH1 region, an immunoglobulin hinge, and an Fc region portion.

[0250] In another embodiment, a polypeptide heterodimer comprises the following two single chain polypeptides: from amino terminus to carboxyl terminus, a first single chain polypeptide comprising an immunoglobulin hinge, an Fc region portion, a CL region, a second CL region, and a binding domain; and a second single chain polypeptide comprising an immunoglobulin hinge, an Fc region portion, a CH1 region, and a second CH1 region.

[0251] In another embodiment, a polypeptide heterodimer comprises the following two single chain polypeptides: from amino terminus to carboxyl terminus, a first single chain polypeptide comprising a binding domain, a CH1 region, an immunoglobulin hinge, an Fc region portion, and a CL region; and a second single chain polypeptide comprising a CL region, an immunoglobulin hinge, an Fc region portion, and a CH1 region.

[0252] In another embodiment, a polypeptide heterodimer comprises the following two single chain polypeptides: from amino terminus to carboxyl terminus, a first single chain polypeptide comprising a binding domain, a CL region, an immunoglobulin hinge, an Fc region portion, and a CH1 region; and a second single chain polypeptide comprising a CH1 region, an immunoglobulin hinge, an Fc region portion, and a CL region.

[0253] In another embodiment, a polypeptide heterodimer comprises the following two single chain polypeptides: from amino terminus to carboxyl terminus, a first single chain polypeptide comprising a binding domain, a CH1 region, a CL region, an immunoglobulin hinge, and an Fc region portion; and a second single chain polypeptide comprising a CL region, a CH1 region, an immunoglobulin hinge and an Fc region portion.

[0254] In another embodiment, a polypeptide heterodimer comprises the following two single chain polypeptides: from amino terminus to carboxyl terminus, a first single chain polypeptide comprising a binding domain, a CL region, a CH1 region, an immunoglobulin hinge, and an Fc region portion; and a second single chain polypeptide comprising a CH1 region, a CL region, an immunoglobulin hinge and an Fc region portion.

[0255] In another embodiment, a polypeptide heterodimer comprises the following two single chain polypeptides: from amino terminus to carboxyl terminus, a first single chain polypeptide comprising a binding domain, an immunoglobulin hinge, an Fc region portion, a CH1 region and a CL region; and a second single chain polypeptide comprising an immunoglobulin hinge, an Fc region portion, a CL region and a CH1 region.

[0256] In another embodiment, a polypeptide heterodimer comprises the following two single chain polypeptides: from amino terminus to carboxyl terminus, a first single chain polypeptide comprising a binding domain, an immunoglobulin hinge, an Fc region portion, a CL region and a CH1 region; and a second single chain polypeptide comprising an immunoglobulin hinge, an Fc region portion, a CH1 region and a CL region.

[0257] In another embodiment, a polypeptide heterodimer comprises the following two single chain polypeptides: from amino terminus to carboxyl terminus, a first single chain polypeptide comprising a CH1 region, an immunoglobulin hinge, an Fc region portion, a CL region, and a binding domain; and a second single chain polypeptide comprising a CL region, an immunoglobulin hinge, an Fc region portion, and a CH1 region.

[0258] In another embodiment, a polypeptide heterodimer comprises the following two single chain polypeptides: from amino terminus to carboxyl terminus, a first single chain polypeptide comprising a CL region, an immunoglobulin hinge, an Fc region portion, a CH1 region, and a binding domain; and a second single chain polypeptide comprising a CH1 region, an immunoglobulin hinge, an Fc region portion, and a CL region.

[0259] In another embodiment, a polypeptide heterodimer comprises the following two single chain polypeptides: from amino terminus to carboxyl terminus, a first single chain polypeptide comprising a CH1 region, a CL region, an immunoglobulin hinge, an Fc region portion, and a binding domain; and a second single chain polypeptide comprising a CL region, a CH1 region, an immunoglobulin hinge and an Fc region portion.

[0260] In another embodiment, a polypeptide heterodimer comprises the following two single chain polypeptides: from amino terminus to carboxyl terminus, a first single chain polypeptide comprising a CL region, a CH1 region, an immunoglobulin hinge, an Fc region portion, and a binding domain; and a second single chain polypeptide comprising a CH1 region, a CL region, an immunoglobulin hinge and an Fc region portion.

[0261] In another embodiment, a polypeptide heterodimer comprises the following two single chain polypeptides: from amino terminus to carboxyl terminus, a first single chain polypeptide comprising an immunoglobulin hinge, an Fc region portion, a CH1 region, a CL region, and a binding domain; and a second single chain polypeptide comprising an immunoglobulin hinge, an Fc region portion, a CL region and a CH1 region.

[0262] In another embodiment, a polypeptide heterodimer comprises the following two single chain polypeptides: from amino terminus to carboxyl terminus, a first single chain polypeptide comprising an immunoglobulin hinge, an Fc region portion, a CL region, a CH1 region, and a binding domain; and a second single chain polypeptide comprising an immunoglobulin hinge, an Fc region portion, a CH1 region and a CL region.

[0263] In any of the embodiments described herein, the binding domain may be on either the first single chain polypeptide or on the second single chain polypeptide. In other words, the first single chain polypeptide will be the long polypeptide (having a binding domain) when the second single chain polypeptide is the short (lacking a binding domain) polypeptide. Conversely, the first single chain polypeptide will be the short polypeptide (lacking a binding domain) when the second single chain polypeptide is the long (having a binding domain) polypeptide.

[0264] Exemplary heterodimers may be formed from single chain polypeptide pairs described herein. If sequence identification numbers noted herein contain signal peptide sequences (e.g., the first 20 amino acids), such signal peptide sequences are not part of the mature single chain polypeptides that form the exemplary polypeptide heterodimers and thus should be considered excluded.

[0265] As described herein, a first or long single chain polypeptide of a polypeptide heterodimer comprises a binding domain, a hinge, an immunoglobulin heterodimerization domain (e.g., CH1, CL), and an Fc region portion. Exemplary first single chain polypeptides (with or without a signal peptide sequence) are set forth in SEQ ID NOS:22, 26, 30, 36, 38, 42, 46, 56, 60, 62, 70, 135, 139, 263, 267, 769, 780, and 781. In certain embodiments, the first single chain polypeptide may further comprise an additional immunoglobulin heterodimerization domain.

[0266] Also as described herein, a second or short single chain polypeptide of a polypeptide heterodimer comprises a hinge, an immunoglobulin heterodimerization domain, and an Fc region portion. Exemplary second single chain polypeptides (either with or without a signal peptide sequence) as set forth in SEQ ID NOS:24, 28, 32, 34, 40, 44, 48, 50, 52, 54, 58, 64, 66, 68, 72-105, 127, 129, 131, 133, 137, 193, 765-768, 778 and 779. In certain embodiments, the second single chain polypeptide may further comprise an additional immunoglobulin heterodimerization domain.

[0267] Exemplary heterodimers may be formed from the following single chain polypeptide pairs: SEQ ID NOS: 22 and 24, 26 and 28, 30 and 32, 36 and 34, 38 and 40, 42 and 44, 46 and 48, 56 and 54, 60 and 58, 26 and 52, 70 and 68, 46 and 70, 22 and 50, 62 and 64, 38 and 66, 46 and 64, 62 and 48, 22 and 127, 22 and 129, 22 and 131, 22 and 133, 135 and 24, 135 and 133, 135 and 131, 26 and 137, 139 and 48, 263 and 48, 267 and 48, 769 and 765, 769 and 766, 769 and 767, 769 and 768, 778 and 781, and 779 and 780. Additional exemplary heterodimers may be formed from a first chain as set forth in SEQ ID NO:22 (but without its signal peptide sequence) and a second chain selected from SEQ ID NOS:72-105 and 193.

[0268] Exemplary heterodimers may be formed from the following single chain pairs: SEQ ID NOS:26 and 137, 139 and 48, 46 and 48, 46 and 64, 62 and 48, and 62 and 64. Additional heterodimers may be formed from a first chain as set forth in SEQ ID NO:22 (but without its signal peptide sequence) and a second chain selected from SEQ ID NOS:91, 92, 193, 98, 99, 101, 103, 127, 129, 131, and 133. Heterodimers may also be formed from a first chain as set froth in SEQ ID NO:135 and a second chain selected from SEQ ID NOS:24, 133 and 131.

### Nucleic Acids Encoding Single Chain Polypeptides, Vectors, Host Cells, and Methods for Making Heterodimers

[0269] In a related aspect, the present disclosure also provides isolated nucleic acid (used interchangeably with “polynucleotide”) molecules that encode single chain polypeptides provided herein. Exemplary nucleic acid molecules (either with or without a nucleotide sequence encoding a signal peptide sequence) are set forth in SEQ ID NOS: 21, 23, 25, 27, 29, 31, 33, 35, 37, 39, 41, 43, 45, 47, 49, 51, 53, 55, 57, 59, 61, 63, 65, 67, 69, 126, 128, 130, 132, 134, 136, 138, 760-764, and 774-777.

[0270] The present disclosure also provides vectors that comprise nucleic acid sequence encoding single chain polypeptides provided herein. As used herein, “vector” refers to a nucleic acid molecule capable of transporting another nucleic acid to which it has been linked. Exemplary vectors include plasmids, yeast artificial chromosomes, and viral genomes. Certain vectors can autonomously replicate in a host cell, while other vectors can be integrated into the genome of a host cell and thereby are replicated with the host genome.

[0271] In certain embodiments, the vectors may be recombinant expression vectors. “Recombinant expression vectors” or “expression vectors” refer to vectors that contain nucleic acid sequences that are operatively linked to an expression control sequence (e.g., a promoter) and are thus capable of directing the expression of those sequences.

[0272] Promoter sequences useful in expression vectors provided herein can be selected from any desired gene using CAT (chloramphenicol transferase) vectors or other vectors with selectable markers. Eukaryotic promoters include CMV immediate early, HSV thymidine kinase, early and late SV40, LTRs from retrovirus, and mouse metallothionein-I. In certain embodiments, the promoters are inducible promoters.

[0273] In certain embodiments, a vector is an expression vector that comprises a nucleic acid sequence encoding a first single chain polypeptide of a polypeptide heterodimer provided herein. In certain other embodiments, a vector is an expression vector that comprises a nucleic acid sequence encoding a second single chain polypeptide of a polypeptide heterodimer provided herein.

[0274] In certain embodiments, a vector is an expression vector that comprises nucleic acid sequences encoding both first and second single chain polypeptides of a polypeptide heterodimer. The promoter for the nucleic acid sequence encoding the first single chain polypeptide may be the same as the promoter for the nucleic acid encoding the second single chain polypeptide. Alternatively, the promoter for the nucleic acid sequence encoding the first single chain polypeptide may be different from the promoter for the nucleic acid encoding the second single chain polypeptide so that the expression level of the first and second single chain polypeptides may be differentially modulated to maximum heterodimerization of the first and second single chain polypeptides. In certain embodiments, one or both the promoters for the nucleic acid encoding the first and second single chain polypeptides are inducible promoters.

[0275] The present disclosure also provides a host cell transformed or transfected with, or otherwise containing, any of the nucleic acids or vectors provided herein. Exemplary host cells include VERO cells, HeLa cells, Chinese hamster ovary (CHO) cell lines (including modified CHO cells capable of modifying the glycosylation pattern of expressed multivalent binding molecules, see US Patent Application Publication No. 2003/0115614), COS cells (such as COS-7), W138, BHK, HepG2, 3T3, RIN, MDCK, A549, PC12, K562, HEK293 cells, HepG2 cells, N cells, 3T3 cells, Spodoptera frugiperda cells (e.g., Sf9 cells), Saccharomyces cerevisiae cells, Escherichia coli, Bacillus subtilis, Salmonella typhimurium, and a member of the Streptomycete family.

[0276] In certain embodiments, a host cell comprises a first expression vector containing a nucleic acid encoding a first single chain polypeptide and a second expression vector containing a nucleic acid encoding a second single chain polypeptide.

[0277] In certain other embodiments, a host cell comprises an expression vector containing a nucleic acid encoding both first and second single chain polypeptides.

[0278] The disclosure also includes a method of producing polypeptide heterodimers described herein. In certain embodiments, the method comprises culturing a host cell that comprises nucleic acids encoding both the first and second single chain polypeptides under conditions suitable to express the polypeptides, and optionally isolating or purifying the heterodimers formed from the first and second single chain polypeptides from the culture. The nucleic acid encoding the first single chain polypeptide and the nucleic acid encoding the second single chain polypeptide may be present in a single expression vector in the host cell or in two different expression vectors in the host cells. In the latter case, the ratio between the two expression vectors may be controlled to maximize heterodimerization of the first and second single chain polypeptides.

[0279] The present disclosure provides purified polypeptide heterodimers as described herein. The term “purified,” as used herein, refers to a composition, isolatable from other components, wherein the polypeptide heterodimer is enriched to any degree relative to its naturally obtainable state. In certain embodiments, the present disclosure provides substantially purified polypeptide heterodimers as described herein. “Substantially purified” refers to a polypeptide heterodimer composition in which the polypeptide heterodimer forms the major component of the composition, such as constituting at least about 50%, such as at least about 60%, about 70%, about 80%, about 90%, about 95%, about 99%, of the polypeptides, by weight, in the composition.

[0280] Protein purification techniques are well known to those of skill in the art. These techniques involve, at one level, the crude fractionation of the polypeptide and non-polypeptide fractions. Further purification using chromatographic and electrophoretic techniques to achieve partial or complete purification (or purification to homogeneity) is frequently desired. Analytical methods particularly suited to the preparation of a pure fusion protein are ion-exchange chromatography, size exclusion chromatography; polyacrylamide gel electrophoresis; and isoelectric focusing. Particularly efficient methods of purifying peptides are fast protein liquid chromatography and HPLC.

[0281] Various methods for quantifying the degree of purification are known to those of skill in the art in light of the present disclosure. These include, for example, assessing the amount of polypeptide heterodimers in a fraction by SDS/PAGE analysis and HPLC as illustrated in the examples provided herein.

[0282] The method for making polypeptide heterodimers provided herein is advantageous over a method for first expressing and purifying separately individual single chain polypeptides and then incubating purified individual single chain polypeptides together to form polypeptide heterodimers. For example, certain single chain polypeptides (e.g., certain polypeptides containing only CH1 regions as their immunoglobulin heterodimerization domains) are unstable when expressed alone. In addition, separate expression and purification of individual single chain polypeptides followed by combining the purified individual single chain polypeptides involve more steps than coexpressing both single chain polypeptides followed by purifying resulting polypeptide heterodimers and generally less efficient.

### Compositions and Methods for Using Heterodimers

[0283] In addition to polypeptide heterodimers, the present disclosure also provides pharmaceutical compositions and unit dose forms that comprise the polypeptide heterodimers as well as methods for using the polypeptide heterodimers, the pharmaceutical compositions and unit dose forms.

[0284] Compositions of polypeptide heterodimers of this disclosure generally comprise a polypeptide heterodimer provided herein in combination with a pharmaceutically acceptable excipient, including pharmaceutically acceptable carriers and diluents. Pharmaceutical acceptable excipients will be nontoxic to recipients at the dosages and concentrations employed. They are well known in the pharmaceutical art and described, for example, in Rowe et al., Handbook of Pharmaecutical Excipients: A Comprehensive Guid to Uses, Properties, and Safety, 5^{th} Ed., 2006.

[0285] Pharmaceutically acceptable carriers for therapeutic use are also well known in the pharmaceutical art, and are described, for example, in Remington's Pharmaceutical Sciences, Mack Publishing Co. (A. R. Gennaro (Ed.) 1985). Exemplary pharmaceutically acceptable carriers include sterile saline and phosphate buffered saline at physiological pH. Preservatives, stabilizers, dyes and the like may be provided in the pharmaceutical composition. In addition, antioxidants and suspending agents may also be used.

[0286] Pharmaceutical compositions may also contain diluents such as buffers, antioxidants such as ascorbic acid, low molecular weight (less than about 10 residues) polypeptides, proteins, amino acids, carbohydrates (e.g., glucose, sucrose, dextrins), chelating agents (e.g., EDTA), glutathione and other stabilizers and excipients. Neutral buffered saline or saline mixed with nonspecific serum albumin are exemplary diluents. For instance, the product may be formulated as a lyophilizate using appropriate excipient solutions (e.g., sucrose) as diluents.

[0287] The present disclosure also provides a method for treating a disease or disorder associated with, for example, excessive receptor-mediated signal transduction, comprising administering to a patient in need thereof an effective amount of a polypeptide heterodimer comprising a binding domain that specifically binds a receptor.

[0288] Exemplary diseases or disorders associated with excess receptor-mediated signal transduction include cancer (e.g., solid malignancy and hematologic malignancy), autoimmune or inflammatory diseases or conditions, sepsis resulting from bacterial infection, and viral infection.

[0289] The present disclosure also provides a method for reducing T cell activation comprising administering to a patient in need thereof an effective amount of a polypeptide heterodimer provided herein that specifically binds CD28. A treatment “reduces T cell activation” if it causes statistically reduction of T cell activation. Assays for measuring T cell activation are known in the art, such as those used in the examples provided herein.

[0290] In one aspect, the present disclosure provides a method for inhibiting growth of a solid malignancy, inhibiting metastasis or metastatic growth of a solid malignancy, or treating or ameliorating a hematologic malignancy, comprising administering to a patient in need thereof an effective amount of a polypeptide heterodimer provided herein or a composition thereof

[0291] A wide variety of cancers, including solid malignancy and hematologic malignancy are amenable to the compositions and methods disclosed herein. Types of cancer that may be treated include, but are not limited to: adenocarcinoma of the breast, prostate, pancreas, colon and rectum; all forms of bronchogenic carcinoma of the lung (including squamous cell carcinoma, adenocarcinoma, small cell lung cancer and non-small cell lung cancer); myeloid; melanoma; hepatoma; neuroblastoma; papilloma; apudoma; choristoma; branchioma; malignant carcinoid syndrome; carcinoid heart disease; and carcinoma (e.g., Walker, basal cell, basosquamous, Brown-Pearce, ductal, Ehrlich tumor, Krebs 2, merkel cell, mucinous, non-small cell lung, oat cell, papillary, scirrhous, bronchiolar, bronchogenic, squamous cell, and transitional cell). Additional types of cancers that may be treated include: histiocytic disorders; leukemia; histiocytosis malignant; Hodgkin's disease; immunoproliferative small; non-Hodgkin's lymphoma; plasmacytoma; reticuloendotheliosis; melanoma; chondroblastoma; chondroma; chondrosarcoma; fibroma; fibrosarcoma; giant cell tumors; histiocytoma; lipoma; liposarcoma; mesothelioma; myxoma; myxosarcoma; osteoma; osteosarcoma; chordoma; craniopharyngioma; dysgerminoma; hamartoma; mesenchymoma; mesonephroma; myosarcoma; ameloblastoma; cementoma; odontoma; teratoma; thymoma; trophoblastic tumor. Further, the following types of cancers are also contemplated as amenable to treatment: adenoma; cholangioma; cholesteatoma; cyclindroma; cystadenocarcinoma; cystadenoma; granulosa cell tumor; gynandroblastoma; hepatoma; hidradenoma; islet cell tumor; Leydig cell tumor; papilloma; sertoli cell tumor; theca cell tumor; leimyoma; leiomyosarcoma; myoblastoma; myomma; myosarcoma; rhabdomyoma; rhabdomyosarcoma; ependymoma; ganglioneuroma; glioma; medulloblastoma; meningioma; neurilemmoma; neuroblastoma; neuroepithelioma; neurofibroma; neuroma; paraganglioma; paraganglioma nonchromaffin; and glioblastoma multiforme. The types of cancers that may be treated also include, but are not limited to, angiokeratoma; angiolymphoid hyperplasia with eosinophilia; angioma sclerosing; angiomatosis; glomangioma; hemangioendothelioma; hemangioma; hemangiopericytoma; hemangiosarcoma; lymphangioma; lymphangiomyoma; lymphangiosarcoma; pinealoma; carcinosarcoma; chondrosarcoma; cystosarcoma phyllodes; fibrosarcoma; hemangiosarcoma; leiomyosarcoma; leukosarcoma; liposarcoma; lymphangiosarcoma; myosarcoma; myxosarcoma; ovarian carcinoma; rhabdomyosarcoma; sarcoma; neoplasms; nerofibromatosis; and cervical dysplasia. The invention further provides compositions and methods useful in the treatment of other conditions in which cells have become immortalized or hyperproliferative due to abnormally high expression of antigen.

[0292] Additional exemplary cancers that are also amenable to the compositions and methods disclosed herein are B-cell cancers, including B-cell lymphomas [such as various forms of Hodgkin's disease, non-Hodgkins lymphoma (NHL) or central nervous system lymphomas], leukemias [such as acute lymphoblastic leukemia (ALL), chronic lymphocytic leukemia (CLL), Hairy cell leukemia and chronic myoblastic leukemia] and myelomas (such as multiple myeloma). Additional B cell cancers include small lymphocytic lymphoma, B-cell prolymphocytic leukemia, lymphoplasmacytic lymphoma, splenic marginal zone lymphoma, plasma cell myeloma, solitary plasmacytoma of bone, extraosseous plasmacytoma, extra-nodal marginal zone B-cell lymphoma of mucosa-associated (MALT) lymphoid tissue, nodal marginal zone B-cell lymphoma, follicular lymphoma, mantle cell lymphoma, diffuse large B-cell lymphoma, mediastinal (thymic) large B-cell lymphoma, intravascular large B-cell lymphoma, primary effusion lymphoma, Burkitt lymphoma/leukemia, B-cell proliferations of uncertain malignant potential, lymphomatoid granulomatosis, and post-transplant lymphoproliferative disorder.

[0293] Polypeptide heterodimers useful for inhibiting growth of a solid malignancy or metastasis or metastatic growth of a solid malignancy include those that specifically bind to, for example, EGFR, ErbB3, ErbB4, c-Met, RON, EphA2, IGF1R, VEGFR1, VEGFR2, VEGFR3, CD44v6, CD151, CEACAM6, TGFBR2, GHRHR, GHR, IL6R, gp130, TNFR2, PD1, TWEAK-R, OSMRβ, Patched-1, Frizzled, or Robo1.

[0294] Polypeptide heterodimers useful for inhibiting growth of a solid malignancy or metastasis or metastatic growth of a hematologic malignancy include those that specifically bind to, for example, EGFR, ErbB3, c-Met, RON, EphA2, IGF1R, TGFBR2, IL6R, gp130, TNFR2, PD1, OSMRβ, LTβR, CD19, CD80, CD81, or CD86.

[0295] In another aspect, the present disclosure provides a method for treating an autoimmune or inflammatory disease, disorder or condition, comprising administering to a patient in need thereof an effective amount of a polypeptide heterodimer provided herein or a composition thereof.

[0296] Exemplary autoimmune or inflammatory diseases, disorders or conditions that may be treated by the fusion proteins and compositions and unit dose forms thereof include, and are not limited to, inflammatory bowel disease (e.g., Crohn's disease or ulcerative colitis), diabetes mellitus (e.g., type I diabetes), dermatomyositis, polymyositis, pernicious anaemia, primary biliary cirrhosis, acute disseminated encephalomyelitis (ADEM), Addison's disease, ankylosing spondylitis, antiphospholipid antibody syndrome (APS), autoimmune hepatitis, Goodpasture's syndrome, Graves' disease, Guillain-Barré syndrome (GBS), Hashimoto's disease, idiopathic thrombocytopenic purpura, systemic lupus erythematosus, lupus nephritis, neuropsychiatric lupus, multiple sclerosis (MS), myasthenia gravis, pemphigus vulgaris, asthma, psoriatic arthritis, rheumatoid arthritis, Sjogren's syndrome, temporal arteritis (also known as “giant cell arteritis”), autoimmune hemolytic anemia, Bullous pemphigoid, vasculitis, coeliac disease, chronic obstructive pulmonary disease, endometriosis, Hidradenitis suppurativa, interstitial cystitis, morphea, scleroderma, narcolepsy, neuromyotonia, vitiligo, and autoimmune inner ear disease.

[0297] Polypeptide heterodimers useful for treating an autoimmune or inflammatory disease, disorder or condition include those that specifically bind to, for example, TGFBR2, IL6R, gp130, TNFR1, TNFR2, PD1, HVEM, OX40, CD40, CD137, TWEAK-R, LTβR, LIFRβ, OSMRβ, CD3, TCRα, TCRβ, CD19, CD28, CD80, CD81, CD86, TLR7, or TLR9.

[0298] In another aspect, the present disclosure provides a method for reducing the risk of sepsis associated with a bacterial infection, comprising administering to a patient in need thereof an effective amount of a polypeptide heterodimer provided herein or a composition thereof. Exemplary polypeptide heterodimers useful for such treatments include those that specifically bind to TLR9.

[0299] In another aspect, the present disclosure provides a method for treating viral infection, comprising administering to a patient in need thereof an effective amount of a polypeptide heterodimer provided herein or a composition thereof. Exemplary polypeptide heterodimers useful for such treatments include those that specifically bind to HVEM, OX40, or LTβR.

[0300] The polypeptide heterodimers or compositions thereof of the present disclosure may be administered orally, topically, transdermally, parenterally, by inhalation spray, vaginally, rectally, or by intracranial injection, or any combination thereof. In one embodiment, the polypeptide heterodimers or compositions thereof are administered parenterally. The term “parenteral,” as used herein, includes subcutaneous injections, intravenous, intramuscular, intracisternal injection, or infusion techniques. Administration by intravenous, intradermal, intramusclar, intramammary, intraperitoneal, intrathecal, retrobulbar, intrapulmonary injection and/or surgical implantation at a particular site is contemplated as well. For instance, the invention includes administering polypeptide heterodimers or compositions thereof by intravenous injection.

[0301] The pharmaceutically effective dose depends on the type of disease, the composition used, the route of administration, the type of subject being treated, the physical characteristics of the specific subject under consideration for treatment, concurrent medication, and other factors that those skilled in the medical arts will recognize. For example, an amount between 0.01 mg/kg and 1000 mg/kg (e.g., between 0.1 mg/kg and 100 mg/kg, or between 1 mg/kg and 10 mg/kg) body weight (which can be administered as a single dose, daily, weekly, monthly, or at any appropriate interval) of active ingredient may be administered depending on the potency of a polypeptide heterodimer of this disclosure.

[0302] Also contemplated is the administration of polypeptide heterodimers or compositions thereof in combination with a second agent. A second agent may be one accepted in the art as a standard treatment for a particular disease state or disorder, such as in cancer, inflammation, autoimmunity, and infection. Exemplary second agents contemplated include polypeptide heterodimers that bind to targets different from those that primary polypeptide heterodimers bind, polyclonal antibodies, monoclonal antibodies, immunoglobulin-derived fusion proteins, chemotherapeutics, ionizing radiation, steroids, NSAIDs, anti-infective agents, or other active and ancillary agents, or any combination thereof

[0303] In certain embodiments, a polypeptide heterodimer and a second agent act synergistically. In other words, these two compounds interact such that the combined effect of the compounds is greater than the sum of the individual effects of each compound when administered alone (see, e.g., Berenbaum, Pharmacol. Rev. 41:93, 1989).

[0304] In certain other embodiments, a polypeptide heterodimer and a second agent act additively. In other words, these two compounds interact such that the combined effect of the compounds is the same as the sum of the individual effects of each compound when administered alone.

[0305] Second agents useful in combination with polypeptide heterodimers or compositions thereof provided herein for reducing T cell activation may be steroids, NSAIDs, mTOR inhibitors (e.g., rapamycin (sirolimus), temsirolimus, deforolimus, everolimus, zotarolimus, curcumin, farnesylthiosalicylic acid), calcineurin inhibitors (e.g., cyclosporine, tacrolimus), anti-metabolites (e.g., mycophenolic acid, mycophenolate mofetil), polyclonal antibodies (e.g., anti-thymocyte globulin), monoclonal antibodies (e.g., daclizumab, basiliximab), and CTLA4-Ig fusion proteins (e.g., abatacept or belatacept).

[0306] Additional second agents useful for reducing T cell activation may be a polyclonal or monoclonal antibody, an immunoglobulin-derived fusion protein (e.g., scFv, SMIP™, PIMS, SCORPION™, and Xceptor fusion proteins), or a polypeptide heterodimer according to the present disclosure that specifically bind a T-cell specific molecule, such as CD3, CD28, PD-1, HVEM, BTLA, CD80, CD86, GITR, or TGFBR1.

[0307] Second agents useful for inhibiting growth of a solid malignancy, inhibiting metastasis or metastatic growth of a solid malignancy, or treating or ameliorating a hematologic malignancy include chemotherapeutic agents, ionizing radiation, and other anti-cancer drugs. Examples of chemotherapeutic agents contemplated as further therapeutic agents include alkylating agents, such as nitrogen mustards (e.g., mechlorethamine, cyclophosphamide, ifosfamide, melphalan, and chlorambucil); bifunctional chemotherapeutics (e.g., bendamustine); nitrosoureas (e.g., carmustine (BCNU), lomustine (CCNU), and semustine (methyl-CCNU)); ethyleneimines and methyl-melamines (e.g., triethylenemelamine (TEM), triethylene thiophosphoramide (thiotepa), and hexamethylmelamine (HMM, altretamine)); alkyl sulfonates (e.g., buslfan); and triazines (e.g., dacabazine (DTIC)); antimetabolites, such as folic acid analogues (e.g., methotrexate, trimetrexate, and pemetrexed (multi-targeted antifolate)); pyrimidine analogues (such as 5-fluorouracil (5-FU), fluorodeoxyuridine, gemcitabine, cytosine arabinoside (AraC, cytarabine), 5-azacytidine, and 2,2′-difluorodeoxycytidine); and purine analogues (e.g, 6-mercaptopurine, 6-thioguanine, azathioprine, 2′-deoxycoformycin (pentostatin), erythrohydroxynonyladenine (EHNA), fludarabine phosphate, 2-chlorodeoxyadenosine (cladribine, 2-CdA)); Type I topoisomerase inhibitors such as camptothecin (CPT), topotecan, and irinotecan; natural products, such as epipodophylotoxins (e.g., etoposide and teniposide); and vinca alkaloids (e.g., vinblastine, vincristine, and vinorelbine); anti-tumor antibiotics such as actinomycin D, doxorubicin, and bleomycin; radiosensitizers such as 5-bromodeozyuridine, 5-iododeoxyuridine, and bromodeoxycytidine; platinum coordination complexes such as cisplatin, carboplatin, and oxaliplatin; substituted ureas, such as hydroxyurea; and methylhydrazine derivatives such as N-methylhydrazine (MIH) and procarbazine.

[0308] In certain embodiments, second agents useful for inhibiting growth of a solid malignancy, inhibiting metastasis or metastatic growth of a solid malignancy, or treating or ameliorating a hematologic malignancy include polypeptide heterodimers according to the present disclosure that bind to cancer cell targets other than the target that the first polypeptide heterodimer binds. In certain other embodiments, second agents useful for such treatments include polyclonal antibodies, monoclonal antibodies, and immunoglobulin-derived fusion proteins that bind to cancer cell targets. Exemplary cancer cell targets are provided above in the context of describing targets of polypeptide heterodimers useful for the above-noted treatment.

[0309] Further therapeutic agents contemplated by this disclosure for treatment of autoimmune diseases are referred to as immunosuppressive agents, which act to suppress or mask the immune system of the individual being treated. Immunosuppressive agents include, for example, non-steroidal anti-inflammatory drugs (NSAIDs), analgesics, glucocorticoids, disease-modifying antirheumatic drugs (DMARDs) for the treatment of arthritis, or biologic response modifiers. Compositions in the DMARD description are also useful in the treatment of many other autoimmune diseases aside from rheumatoid arthritis.

[0310] Exemplary NSAIDs are chosen from the group consisting of ibuprofen, naproxen, naproxen sodium, Cox-2 inhibitors such as Vioxx and Celebrex, and sialylates. Exemplary analgesics are chosen from the group consisting of acetaminophen, oxycodone, tramadol of proporxyphene hydrochloride. Exemplary glucocorticoids are chosen from the group consisting of cortisone, dexamethasone, hydrocortisone, methylprednisolone, prednisolone, or prednisone. Exemplary biological response modifiers include molecules directed against cell surface markers (e.g., CD4, CD5, etc.), cytokine inhibitors, such as the TNF antagonists (e.g. etanercept (Enbrel), adalimumab (Humira) and infliximab (Remicade)), chemokine inhibitors and adhesion molecule inhibitors. The biological response modifiers include monoclonal antibodies as well as recombinant forms of molecules. Exemplary DMARDs include azathioprine, cyclophosphamide, cyclosporine, methotrexate, penicillamine, leflunomide, sulfasalazine, hydroxychloroquine, Gold (oral (auranofin) and intramuscular) and minocycline.

[0311] Additional second agents useful for treating an autoimmune or inflammatory disease, disorder or condition may be a polyclonal or monoclonal antibody, an immunoglobulin-derived fusion protein (e.g., scFv, SMIP, PIMS, SCORPION™, and XCEPTOR™ fusion proteins), or a polypeptide heterodimer according to the present disclosure that specifically bind a target associated with such a disease, disorder or condition. Examples of such targets are provided above in the context of targets of polypeptide heterodimers of the present disclosure useful in the above-noted treatment bind.

[0312] In certain embodiments, second agents useful for treating sepsis associated with bacterial infection include chloroquine and small molecule TLR9 inhibitors (see, e.g., Yasuda et al. (2008) Am. J. Physiol. Renal Physiol. 294:F1050-F1058), recombinant human activated protein C, insulin, colloid or crystalloid, vasoactive agents, corticosteroids (see, e.g., Hotchkiss and Karl (2003) New England Journal of Medicine 348:138-150) and inhibitory CpG DNA sequences (see, e.g., Krieg et al. (1998) Proc. Natl. Acad. Sci. USA 95:12631-12636).

[0313] In certain embodiments, second agents useful for treating viral infection include other antiviral agents. Examples of such other antiviral agents include acyclovir, valacyclovir and famciclovir that may be used with an HVEM-specific heterodimer, oseltamivir, zanamivir, amantadine and rimantadine that may be used with an OX40-specific heterodimer, and anti-HIV agents that may be used with an LTβR-specific heterodimer. Exemplary anti-HIV agents include Abacavir (formerly Ziagen), Agenerase (amprenavir), Aptivus® (tipranavir), and Crixivan (indinavir), Delavirdine (formerly Rescriptor), efavirenz (formerly Sustiva), Emtriva [emtricitabine (FTC)], Epivir (lamivudine), Fortovase (saquinavir), Fuzeon (enfuvirtide), Hivid (ddc/zalcitabine), INTELENCE™ (Etravirine), Isentress (raltegravir), Invirase (saquinavir), Kaletra (lopinavir), lamivudine, Lexiva (Fosamprenavir), Nevirapine (formerly Viramune), Norvir (ritonavir), PREZISTA (darunavir), Retrovir [AZT (zidovudine)], Reyataz (atazanavir; BMS-232632), SELZENTRY™ (maraviroc), Stavudine (formerly Zerit), Tenofovir DF, Trizivir, Truvada. Videx (ddl/didanosine), Viracept (nelfinavir), Viread (tenofovir disoproxil fumarate), and zidovudine. In certain other embodiments, second agents useful for such a treatment include polyclonal antibodies, monoclonal antibodies, and immunoglobulin-derived fusion proteins or a polypeptide heterodimer according to the present disclosure that bind to targets associated with viral infection. Exemplary targets associated with viral infection include HVEM, OX40 and LTβR.

[0314] It is contemplated the binding molecule composition and the second active agent may be given simultaneously in the same formulation. Alternatively, the second agents may be administered in a separate formulation but concurrently (i.e., given within less than one hour of each other).

[0315] In certain embodiments, the second active agent may be administered prior to administration of a polypeptide heterodimer or a composition thereof. Prior administration refers to administration of the second active agent at least one hour prior to treatment with the polypeptide heterodimer or the composition thereof. It is further contemplated that the active agent may be administered subsequent to administration of the binding molecule composition. Subsequent administration is meant to describe administration at least one hour after the administration of the polypeptide heterodimer or the composition thereof.

[0316] This disclosure contemplates a dosage unit comprising a pharmaceutical composition of this disclosure. Such dosage units include, for example, a single-dose or a multi-dose vial or syringe, including a two-compartment vial or syringe, one comprising the pharmaceutical composition of this disclosure in lyophilized form and the other a diluent for reconstitution. A multi-dose dosage unit can also be, e.g., a bag or tube for connection to an intravenous infusion device.

[0317] This disclosure also contemplates a kit comprising a pharmaceutical composition of this disclosure in unit dose, or multi-dose, container, e.g., a vial, and a set of instructions for administering the composition to patients suffering a disorder such as a disorder described above.

### EXAMPLES

### Example 1

### Making of Single Chain Binding Polypeptides and Polypeptide Heterodimers thereof

### 1. Introduction

[0318] This example describes various single chain polypeptides and polypeptide heterodimers thereof that contain a single binding domain and have immunoglobulin heterodimerization domain pairs of Cκ-CH1 or Cλ-CH1, or a combination of these pairs. In the simplest form, polypeptide heterodimers (also referred to as Interceptors) are made by co-expressing two unequal chains, one chain having a Cκ or Cλ domain and the other chain having a CH1 region. For example, the first chain polypeptide, designated the long chain, has a binding domain in the form of scFv and a CH1 heterodimerization domain, whereas the other chain, designated the short chain, lacks a binding domain but has a Cκ heterodimerization domain. Polypeptide heterodimers (Interceptors) will generally bind monovalently to targets and are ideal for blocking receptor/ligand or receptor/receptor interactions and preventing cell activation through receptor cross-linking Other various advantages over, for example, a Fab, include a longer serum half-life and ease of purification due to the presence of the Fc domains.

[0319] Class 1 Interceptors are those with a binding domain at the amino terminus, and Class 2 Interceptors are those with a binding domain at the carboxyl terminus (see, FIG. 1).

[0320] 2. Methods

### 2.1 Construction of Single Chain Polypeptides Used to Make Interceptors

[0321] A small modular immunopharmaceutical protein (SMIP™) containing a 2E12 scFv is referred to as M0039. The DNA sequence of M0039 including a signal sequence (nucleotides 1-66) is set forth in SEQ ID NO:1. The XhoI and XbaI sites at positions 356-361 and 201-206 were subsequently mutated to CTCGGG and TCTGGA, respectively, without changing the amino acid sequence. The mutated M0039 was subsequently used as a template to build some of the molecules described herein. The amino acid sequence of mutated M0039 is set forth in SEQ ID NO:2. The first 22 amino acids of SEQ ID NO:2 are a signal peptide sequence, which is cleaved when the protein is exported from the host cell. The amino acid sequence of the signal peptide is also set forth in SEQ ID NO:110.

### 2.1.1 Construction of 2E12 CH1CH2CH3 (X0112)

[0322] First, the CH1 fragment (heterodimerization domain) was cloned by PCR using the oligonucleotides CH1xhonewF (SEQ ID NO:3) and CH1BsiwnewR (SEQ ID NO:4), with template X0038 (a construct containing the CH1 fragment). The PCR fragment was subsequently isolated and digested with XhoI and BsiWI restriction enzymes. Second, the CH2-CH3 Fc region portion was amplified by PCR using the oligonucleotides CH2BsiwnewF (SEQ ID NO:5) and CH3NotnewR (SEQ ID NO:6) with template M0077, an anti-CD79b SMIP construct containing wild type CH2CH3 domain sequences (Fc region portion). The Fc region fragment was then isolated and digested with XhoI and BsiWI restriction enzymes. The CH1 heterodimerization domain and Fc region fragments were then ligated into the pD28 vector using the XhoI and NotI restriction sites.

[0323] The 2E12 scFv binding domain was also cloned by PCR using the oligonucleotides 2E12AgeF (SEQ ID NO:7) and 2E12XhoR (SEQ ID NO:8) using the mutated M0039 as the template. The scFv fragment was isolated, digested with restriction enzymes AgeI and XhoI and ligated into the new pD28 vector as described above utilizing the AgeI and XhoI sites.

[0324] The nucleotide sequence encoding, and the amino acid sequence of, the resulting single chain fusion protein, X0112, are set forth in SEQ ID NOS:21 and 22, respectively. The first 60 nucleotides in SEQ ID NO:21 encode the first 20 amino acids, a signal peptide, in SEQ ID NO:22. The amino acid sequence of the signal peptide is also set forth in SEQ ID NO:111.

### 2.1.2 Construction of CKCH2CH3 (X0113)

[0325] First, the Cκ fragment was cloned by PCR using the oligonucleotides CkAgeIF (SEQ ID NO:9) and CkBsiWR (SEQ ID NO:10) with template X0033 containing the Ck domain. The PCR fragment was subsequently isolated and digested with AgeI and BsiWI restriction enzymes. Second, the CH2CH3 domain was cloned by PCR using the oligonucleotides CH2 BsiwnewF (SEQ ID NO:11) and CH3NotnewR (SEQ ID NO:12) with template M0077 containing the wild type CH2CH3. The fragment was then isolated and digested with BsiWI and NotI. The Cκ heterodimerization domain and Fc region fragments were then ligated into the pD28 vector using the AgeI and NotI sites.

[0326] The nucleotide sequence encoding, and the amino acid sequence of, the resulting single chain fusion protein, X0113, are set forth in SEQ ID NOS:23 and 24, respectively. The first 60 nucleotides in SEQ ID NO:23 encode a 20 amino acid signal peptide in SEQ ID NO:24. The Interceptor, X0124, was made by co-expressing X0112 and X0113.

### 2.1.3 Construction of 2E12 CH2H3CH1 (X0115)

[0327] First, the CH1 fragment was cloned by PCR using the oligonucleotides CH1xbaF (SEQ ID NO:13) and CH1NotR (SEQ ID NO:14) with template X0038, a construct containing the CH1 region. The PCR fragment was subsequently isolated and digested with XbaI and NotI restriction enzymes. Second, the CH2-CH3 domain was cloned out by PCR using the oligonucleotides CH2xhoF (SEQ ID NO:15) and CH3xbaR (SEQ ID NO:16) with template M0077 containing the wild type CH2CH3. The fragment was then isolated and digested with XhoI and XbaI restriction enzymes. The first and second fragments were then ligated into the PD28 vector using the XhoI and NotI restrition sites.

[0328] The 2E12 scFv binding domain was cloned out by PCR using the oligoucleotides 2E12AgeF (SEQ ID NO:7) and 2E12XhoR (SEQ ID NO:8) with mutated M0039 as template. The fragment was isolated, digested with AgeI and XhoI and ligated into the new vector as described above utilizing the AgeI and XhoI sites.

[0329] The nucleotide sequence encoding, and the amino acid sequence of, the resulting single chain fusion protein, X0115, are set forth in SEQ ID NOS:25 and 26. The first 60 nucleotides in SEQ ID NO:25 encode a 20 amino acid signal peptide in SEQ ID NO:26.

### 2.1.4 Construction of CH2CH3Ck (X0114)

[0330] First, the Ck fragment was cloned out by PCR out using the oligonucleotides, CkxbaF (SEQ ID NO:17) and CkNotR (SEQ ID NO:18) with template X0033 containing the Ck domain. The PCR fragment was subsequently isolated and digested with xbaI and NotI restriction enzymes. Second, the CH2CH3 domain was cloned by PCR using the oligonucleotides, CH2AgeF (SEQ ID NO:19) and CH3XbaR (SEQ ID NO:20) with template M0077 containing the wild type CH2CH3. The fragment was then isolated and digested with AgeI and XbaI. The two fragments were then ligated into the PD28 vector using the AgeI and NotI sites.

[0331] The nucleotide sequence encoding, and the amino acid sequence of, the resulting single chain fusion protein, X0114, are set forth in SEQ ID NOS:27 and 28. The first 60 nucleotides in SEQ ID NO:27 encode a 20 amino acid signal peptide in

[0332] SEQ ID NO:28. X0126, an Interceptor with an amino terminal CH1-Ck heterodimerization pair, was made by co-expressing X0115 and X0114.

### 2.1.5. Construction of X0116, X0017, X0118 and X0119

[0333] X0116, X0117, X0118 and X0119 were constructed by introducing F405A and Y407A mutations into X0112, X0113, X0114 and X0115, respectively. The wild type copy of the CH3 domains from these constructs were swapped with the mutated copy of CH3 containing the two mutations from X0045, a construct containing the F405A and Y407A mutations.

[0334] The nucleotide and amino acid sequences for X0116 are set forth in SEQ ID NOS:29 and 30, for X0117 in SEQ ID NOS:31 and 32, for X0118 in SEQ ID NOS:33 and 34, and for X0119 in SEQ ID NOS:35 and 36, respectively. The first 60 nucleotides in SEQ ID NOS:29, 31, 33, and 35 encode a 20 amino acid signal peptide in SEQ ID NOS:30, 32, 34, and 36, respectively.

[0335] Interceptor X0125 with disabled CH3 interaction and CH1-Ck heterodimerization pair at the amino terminus was made by co-expressing X0116 and X0117, while Interceptor X0127 with disabled CH3 interaction and CH1-Ck heterodimerization pair at the carboxyl terminus was made by co-expressing X0118 and X0119.

### 2.1.6 Construction of 2E12 CH1CH2CH3CH1 (X0120) and CkCH2CH3Ck (X0121)

[0336] X0115 was digested with BsrGI and NotI to release the CH1 fragment. The CH1 fragment was then isolated and ligated into X0112 that had been cut with BsrGI and NotI to generate X0120 .

[0337] Similarly, X0114 was digested with BsrGI and NotI to release Ck fragment which was then isolated and ligated into X0113 that had been cut with BsrGI and NotI to generate X0121.

[0338] The nucleotide and amino acid sequences for X0120 are set forth in SEQ ID NOS:37 and 38, and for X0121 in SEQ ID NOS:39 and 40, respectively. The first 60 nucleotides in SEQ ID NO:37 encode a 20 amino acid signal peptide in SEQ ID NO:38. Co-expression of X0120 and X0121 yielded the X0128 Interceptor, which has two CH1-Ck heterodimerization domain pairs.

### 2.1.7 Construction of 2E12 CH1CH2CH3CH1 F405A Y407A (X0122) and CkCH2CH3Ck F405A Y407A (X0123)

[0339] X0122 and X0123 were created by swapping the BsrGI and NotI fragments of X0116 with X0119 and X0117 with that of X0118, respectively, as described in section 2.1.5.

[0340] The nucleotide and amino acid sequences for X0122 are set forth in SEQ ID NOS:41 and 42, and for X0123 in SEQ ID NOS:43 and 44, respectively. The first 60 nucleotides in SEQ ID NOS:41 and 43 encode a 20 amino acid signal peptide in SEQ ID NOS:42 and 44, respectively. Interceptor X0129 was made by co-expressing X0122 and X0123.

### 2.1.8 Construction of 2E12CH1CH2CH3Ck (X0130) and CkCH2CH3CH1 (X0131)

[0341] X0130 and X0131 were created by swapping the BsrGI and NotI fragment of X0120 with X0121 and X0121 with that of X0120, respectively.

[0342] The amino acid sequences for X0130 are set forth in SEQ ID NOS:45 and 46, and for X0131 in SEQ ID NOS:47 and 48, respectively. The first 60 nucleotides in SEQ ID NOS:45 and 47 encode a 20 amino acid signal peptide in SEQ ID NOS:46 and 48, respectively. The Interceptor X0132 was made by co-expressing X0130 and X0131.

### 2.1.9 Construction of CH2CH3Ck F405A (X0136), 2E12CH2CH3CH1 F405A (X0137), CH2CH3Ck Y407A (X0139) and 2E12CH2CH3CH1 Y407A (X0140)

[0343] X0136 and X0137 were constructed by introducing F405A mutation into X0114 and X0115, respectively. The wild type CH3 domains of X0114 and X0115 were swapped with the CH3 domain from X0095, a construct containing the F405A mutation.

[0344] The nucleotide and amino acid sequences for X0136 are set forth in SEQ ID NOS:53 and 54, and for X0137 in SEQ ID NOS:55 and 56, respectively. The first 60 nucleotides in SEQ ID NOS:53 and 55 encode the first 20 amino acids, a signal peptide, in SEQ ID NOS:54 and 56, respectively.

[0345] X0139 and X0140 were constructed by introducing Y407A mutation into X0114 and X0115, respectively. Again, the CH3 domains from X0114 and X0115 were swapped with the CH3 domain of X0096, a construct containing the Y407A mutation.

[0346] The nucleotide and amino acid sequences for X0139 are set forth in SEQ ID NOS:57 and 58, and for X0140 in SEQ ID NOS:59 and 60, respectively. The first 60 nucleotides in SEQ ID NOS:57 and 59 encode a 20 amino acid signal peptide in SEQ ID NOS:58 and 60, respectively.

[0347] Interceptor X0138 with partially disabled CH3 interactions was made by co-expressing X0136 and X0137, whereas Interceptor X0141 was made by co-expressing X0139 and X0140.

### 2.1.10 Construction of CλCH2CH3 (X0133) and CH2CH3Cλ (X0134)

[0348] Cλ was cloned from tonsil cDNA (Clonetech) and engineered with the XbaI and NotI sites. The isolated fragment was then ligated into X0113 and X0114 to give X0133 and X0134, respectively.

[0349] The nucleotide and amino acid sequences for X0133 are set forth in SEQ ID NOS:49 and 50, and for X0134 in SEQ ID NOS:51 and 52, respectively. The first 60 nucleotides in SEQ ID NOS:49 and 51 encode a 20 amino acid signal peptide in SEQ ID NOS:50 and 52, respectively.

[0350] Interceptor X0142 with CH1-Cλ heterodimerization domain pair at the front end was created by co-expressing X0115 and X0133. Interceptor X0143 with CH1-Cλ heterodimerization domain pair at the back end was created by co-expressing X0115 and X0134.

### 2.1.11 Construction of 2E12CH1CH2CH3Cλ (X0146), CλCH2CH3CH1 (X0147) and CλCH2CH3Cλ (X0148)

[0351] X0146 (2E12CH1CH2CH3Cλ) was made by replacing BsrGI/NotI fragment of X0130 (2E12CH1CH2CH3Cκ) with the same fragment from CH2CH3Cλ (X0134). X0147 was made by replacing HindIII/BsrGI fragment of X0131 with the same fragment from CλCH2CH3 (X0133). X0148 was made by replacing HindIII/BsrGI fragment of CH2CH3Cλ (X0134) with the same fragment from CλCH2CH3 (X0133).

[0352] The nucleotide and amino acid sequences for X0146 are set forth in SEQ ID NOS:61 and 62, for X0147 in SEQ ID NOS:63 and 64, and for X0148 in SEQ ID NOS:65 and 66, respectively. The first 60 nucleotides in SEQ ID NOS:61 and 63 encode a 20 amino acid signal peptide in SEQ ID NOS:62 and 64, respectively.

### 2.1.12 Construction of CH1CH2CH3Ck (X0167) and CkCH2CH3CH1 2E12 (X0168)

[0353] X0167 was made by removing the 2E12 scFv fragment from X0130 (2E12CH1CH2CH3Cκ) using PCR. Briefly, the CH1CH2 fragment was cloned by PCR and reinserted into the same X0130 vector that had been cut with AgeI and BsrGI site, thereby deleting the 2E12 scFv sequence. For X0168, X0131 (CKCH2CH3CH1) was used as a template in which 2E 12 scFv was added on the carboxyl terminus of the molecule. An NKG2D linker (SEQ ID NO:124) was used to link the C-terminus of CH1 with the N-terminus of 2E12 scFv.

[0354] The nucleotide and amino acid sequences for X0167 are set forth in SEQ ID NOS:67 and 68, and for X0168 in SEQ ID NOS:69 and 70, respectively. The first 60 nucleotides in SEQ ID NOS:67 and 69 encode a 20 amino acid signal peptide in SEQ ID NOS:68 and 70, respectively. Interceptor X0171 was created by co-expressing X0167 and X0168 whereas Interceptor X0172 was created by co-expressing X0130 and X0168.

### 2.1.13 Altering Cκ Amino Acids

### 2.1.13.1 Mutagenesis of X0113

[0355] The Cκ domain of X0113 without a signal peptide (SEQ ID NO:71) was mutated with the Invitrogen Quikchange kit at positions N29, N30, Q52, V55, T56, S68 and T70. These residues are also known as N137, N138, Q160, V163, T164, S176 and T178, respectively, from the PDB database (PDB entry #1B6D). Each position was mutated to an alanine (A), resulting in the following versions of X0113: N29A, N30A, Q52A, V55A, T56A, S68A and T70A. The amino acid sequences of X0113 N29A, X0113 N30A, X0113 Q52A, X0113 V55A, X0113 T56A, X0113 S68A, and X0113 T70A are set forth in SEQ ID NOS:72-78, respectively. Co-expressing of X0112 and the X0113 variants resulted in the creation of various Interceptors: X0124 N29A, X0124 N30A, X0124 Q52A, X0124 V55A, X0124 T56A, X0124 S68A and X0124 T70A.

[0356] Double and triple alanine mutations of X0113 were also made as listed below:

| | |
|---|---|
| X0113 V55A N29A | (SEQ ID NO: 79) |
| X0113 V55A N30A | (SEQ ID NO: 80) |
| X0113 V55A Q52A | (SEQ ID NO: 81) |
| X0113 V55A T56A | (SEQ ID NO: 82) |
| X0113 V55A S68A | (SEQ ID NO: 83) |
| X0113 V55A T70A | (SEQ ID NO: 84) |
| X0113 V55A N29A N30A | (SEQ ID NO: 85) |
| X0113 V55A N29A S68A | (SEQ ID NO: 86) |
| X0113 V55A S68A T70A | (SEQ ID NO: 87) |
| X0113 V55A Q52A S68A | (SEQ ID NO: 88) |

[0357] These were co-transfected with X0112 to generate the respective mutants of X0124.

### 2.1.13.2 Mutations on Selected Residues to Bulky Side Chain Amino Acids (R,W,Y,E,Q,L)

[0358] Other mutations were made on four interface residues Q52, T56, S68 and T70 as follows: X0113 Q52R (SEQ ID NO:117), X0113 Q52W (SEQ ID NO:118), X0113 T56R (SEQ ID NO:119), X0113 T56W (SEQ ID NO:120), X0113 S68R (SEQ ID NO:121), X0113 S68W (SEQ ID NO:122), X0113 T7OR (SEQ ID NO:123), and X0113 T70W (SEQ ID NO:124). In addition, a combination of bulky amino acid side chain mutations and alanine mutations were made as shown:

| | |
|---|---|
| X0113 N29R V55A T70A | (SEQ ID NO: 89) |
| X0113 N29K V55A T70A | (SEQ ID NO: 90) |
| X0113 N29W V55A T70A | (SEQ ID NO: 91) |
| X0113 N29Y V55A T70A | (SEQ ID NO: 92) |
| X0113 S68K V55A | (SEQ ID NO: 93) |
| X0113 S68E V55A | (SEQ ID NO: 94) |
| X0113 S68Q V55A | (SEQ ID NO: 95) |
| X0113 T70E V55A | (SEQ ID NO: 96) |
| X0113 Q52L N29A N30A | (SEQ ID NO: 97) |
| X0113 N30R V55A T70A | (SEQ ID NO: 98) |
| X0113 N30K V55A T70A | (SEQ ID NO: 99) |
| X0113 N30W V55A T70A | (SEQ ID NO: 100) |
| X0113 N30E V55A T70A | (SEQ ID NO: 101) |
| X0113 N30G V55A T70A | (SEQ ID NO: 102) |
| (not a bulky side | |
| chain mutation) | |
| X0113 V55R N29A N30A | (SEQ ID NO: 103) |
| X0113 V55W N29A N30A | (SEQ ID NO: 104) |
| X0113 V55E N29A N30A | (SEQ ID NO: 105) |

[0359] All these mutated X0113 were co-transfected with X0112 to generate X0124 with the respective mutations.

### 2.2 Expression of Various Constructs in HEK293 Cells

[0360] The day before transfection, HEK292 cells were suspended at a cell concentration of 0.5×10⁶ cells/ml in Freestyle 293 expression medium (Gibco). For a large transfection, 250 ml of cells were used, but for a small transfection, 60 ml of cells were used. On the transfection day, 320 ul of 293fectin reagent (Invitrogen) was mixed with 8 ml of media. At the same time, 250 ug of DNA for each of the two chains were also mixed with 8ml of media and incubated for 5 minutes. In some transfections, a ratio of 2:1 long to short chains were used. In such a case, 250 ug of long chain DNA and 125 ug of short chain DNA were used. The medium with the 293fectin was then added to the medium with the DNA. After 15 minutes of incubation, the DNA-293fectin mixture was added to the 250m1 of 293 cells and returned to the shaker at 37° C. and shaken at a speed of 120 RPM. For the smaller transfection using 60 ml of cells, a fourth of the DNA, 293fectin and media were used. Table 3 is the list of co-transfections that were performed:

TABLE 3
Exemplary Interceptors

| Interceptor | Chain 1 ID (long chain | Chain 2 ID (short chain |
|---|---|---|
| ID | containing binding domain) | with no binding domain) |
| X0124 | X0112 (SEQ ID NO: 22) | X0113 (SEQ ID NO: 24) |
| X0125 | X0116 (SEQ ID NO: 30) | X0117 (SEQ ID NO: 32) |
| X0126 | X0115 (SEQ ID NO: 26) | X0114 (SEQ ID NO: 28) |
| X0127 | X0119 (SEQ ID NO: 36) | X0118 (SEQ ID NO: 34) |
| X0128 | X0120 (SEQ ID NO: 38) | X0121 (SEQ ID NO: 40) |
| X0129 | X0122 (SEQ ID NO: 42) | X0123 (SEQ ID NO: 44) |
| X0132 | X0130 (SEQ ID NO: 46) | X0131 (SEQ ID NO: 48) |
| X0138 | X0137 (SEQ ID NO: 56) | X0136 (SEQ ID NO: 54) |
| X0141 | X0140 (SEQ ID NO: 60) | X0139 (SEQ ID NO: 58) |
| X0142 | X0112 (SEQ ID NO: 22) | X0133 (SEQ ID NO: 50) |
| X0143 | X0115 (SEQ ID NO: 26) | X0134 (SEQ ID NO: 52) |
| X0149 | X0146 (SEQ ID NO: 62) | X0147 (SEQ ID NO: 64) |
| X0150 | X0120 (SEQ ID NO: 38) | X0148 (SEQ ID NO: 66) |
| X0165 | X0130 (SEQ ID NO: 46) | X0147 (SEQ ID NO: 64) |
| X0166 | X0146 (SEQ ID NO: 62) | X0131 (SEQ ID NO: 48) |
| X0171 | X0168 (SEQ ID NO: 70) | X0167 (SEQ ID NO: 68) |

[0361] Transfections were performed at the 60 ml scale for the mutated Interceptors where X0112 and mutated X0113 were co-transfected at a ratio of 2:1. Below is the list of X0113 mutants that were co-transfected with X0112:

[0362] Set A: N29A, N30A, Q52A, V55A, T56A, S68A and T70A (SEQ ID NOS:72-78, respectively)

[0363] Set B: V55A N29A, V55A N30A, V55A Q52A, V55A T56A, V55A S68A, V55A T70A, V55A N29A N30A, V55A N29A S68A, V55A S68A T70A, V55A Q52A S68A (SEQ ID NOS:79-88, respectively)

[0364] Set C: Q52R, Q52W, T56R, T56W, S68R, S68W, T70R, T70W (SEQ ID NOS:117-124, respectively)

[0365] Set D: N29R V55A T70A, N29K V55A T70A, N29W V55A T70A, N29Y V55A T70A, S68K V55A, S68E V55A, S68Q V55A, T70E V55A, Q52L N29A N30A, N30R V55A T70A, N30K V55A T70A, N30W V55A T70A, N30E V55A T70A, N30G V55A T70A, V55R N29A N30A, V55W N29A N30A, V55E N29A N30A (SEQ ID NOS:89-105, respectively)

[0366] Additional Interceptors were made as shown Table 4 below:

TABLE 4
Additional Exemplary Interceptors

| | Interceptor | Chain 1 ID (long chain | Chain 2 ID (short chain |
|---|---|---|---|
| Interceptor Characteristics | ID | containing binding domain) | with no binding domain) |
| 2E12 scFv is the binding | X0124 | X0112 (SEQ ID NO: 22) | X0113 (SEQ ID NO: 24) |
| domain in Chain 1 | | | |
| Ck near N-terminus of Chain 2 | | | |
| Ck of chain 2 contains WYAE | X0232 | X0112 (SEQ ID NO: 22) | X0229 (SEQ ID NO: 127) |
| (N29W N30Y V55A T70E) | | | |
| mutations | | | |
| Ck of chain 2 contains YYAE | X0233 | X0112 (SEQ ID NO: 22) | X0231 (SEQ ID NO: 129) |
| (N29Y N30Y V55A T70E) | | | |
| mutations | | | |
| Ck of chain 2 contains EAE | X0211 | X0112 (SEQ ID NO: 22) | X0193 (SEQ ID NO: 131) |
| (N30E V55A T70E) mutations | | | |
| Ck of chain 2 contains YAE | X0224 | X0112 (SEQ ID NO: 22) | X0220 (SEQ ID NO: 133) |
| (N30Y V55A T70E) mutations | | | |
| P2C2 scFv is the binding | X0235 | X0234 (SEQ ID NO: 135) | X0113 (SEQ ID NO: 24) |
| domain in Chain 1 | | | |
| Ck is near N-terminus of Chain 2 | | | |
| Ck of chain 2 contains YAE | X0236 | X0234 (SEQ ID NO: 135) | X0220 (SEQ ID NO: 133) |
| (N30Y V55A T70E) mutations | | | |
| Ck of chain 2 contains EAE | X0237 | X0234 (SEQ ID NO: 135) | X0193 (SEQ ID NO: 131) |
| (N30E V55A T70E) mutations | | | |
| 2E12 scFv is the binding | X0126 | X0115 (SEQ ID NO: 26) | X0114 (SEQ ID NO: 28) |
| domain in Chain 1 | | | |
| Ck is near C-terminus of Chain 2 | | | |
| Ck of chain 2 contains YAE | X0238 | X0115 (SEQ ID NO: 26) | X0225 (SEQ ID NO: 137) |
| (N30T V55A T70E) substitutions | | | |

### 2.3 Protein Purification

[0367] Protein A affinity chromatography was used to purify all the proteins. 2 mL of packed protein A agarose (Repligen) was added to a Biorad column (Econo-column chromatography column, size 2.5×10 cm), washed extensively with PBS (10× column volume) and the supernatants were loaded, washed with PBS again and eluted with 3 column volume of Pierce IgG elution buffer. Proteins were then dialyzed extensively against PBS. Proteins were then concentrated using Amicon centrifugal filter devices to a final volume of around 0.5 mL.

[0368] For second step purification, Protein L affinity chromatography or cation exchange chromatography were used. For Protein L purification, protein A purified Interceptor was passed over a Protein L agarose column that had been pre-equilibrated with PBS, washed with PBS (10× column volume) and then eluted with Pierce IgG elution buffer. Proteins were then dialyzed against PBS extensively and concentrated using Amicon centrifugal filter devices to a final volume of around 0.5 mL.

[0369] Samples (200-300 ug) of previously affinity purified (Protein A or Protein L) Interceptor constructs were dialyzed into 20 mM MES, pH 6.0 (Buffer A) and loaded onto a MonoS 5/50 GL cation exchange column (GE Healthcare) at a flow rate of 2 mL/min, using an AKTA Explorer FPLC. The column was allowed to equilibrate for 5 column volumes (CV) and then run in a gradient format to a mixture of 50%:50% buffer A:buffer B (buffer B being 20 mM MES, 1 M NaCl, pH 6.0) over 20 CV. A following mixture of 100% buffer B was run for 5 CV to clean the column, and the system was run for another 5 CV at 100% buffer A to re-equilibrate prior to the next injection. Peaks were collected and analyzed by SDS-PAGE and electrospray mass spectrometry.

### 2.4 Physical Characterization of Proteins on SDS-PAGE and HPLC Size Exclusion Column

[0370] All proteins purified were analyzed on a 10% SDS-PAGE gel using Invitrogen's X-cell Surelock gel box. Size exclusion chromatography was performed on an AKTA Explorer FPLC (Pharmacia Biotech) using a Superdex200 10/300 GL column. Some proteins were analyzed by electrospray mass spectrometry using an Agilent 6120 TOF ES/MS.

### 2.5 ELISA Assay for Interceptor Binding

[0371] One ug of CD28 mIg was coated overnight on a FluoroNunc Maxisorp Maxisorp ELISA plate (Nunc). The plate was washed two times with PBS containing 0.1% Tween 20 and blocked with 5% non-fat milk in PBS for 1 hour. The plate was then washed twice with PBS containing 0.1% Tween 20. Varying concentrations of

[0372] Interceptors were added to each well. The plate was then incubated for a further 1 hour and washed 4 times with PBS containing 0.1% Tween 20. 100 ul of 1000× diluted anti-huIgG HRP (Jackson Immunolabs) or anti-huk HRP (Southern Biotechnology) was added and incubated for 1 hour. The plate was washed 3 times with 5% non-fat milk in PBS and Quantablue NS/K Fluorogenic substrate (Pierce) was added. After 5 minutes of incubation, the plate was read on a Spectra Max Gemini XS plate reader (Molecular Devices). The samples were excited at 325 nm and emission at 420 nm was monitored. Results were expressed as fluorescence units versus concentration of Interceptors.

### 2.6 Thymidine Incorporation Assays

[0373] 2.6.1 Synergy with Suboptimal Concentration of PMA

[0374] Peripheral blood mononuclear cells (PBMC) from in-house donors were isolated from heparinized whole blood via centrifugation over Lymphocyte Separation Media (MP Biomedicals, Aurora, Ohio) and washed two times with RPMI media (Gibco-Invitrogen, Carlsbad, Calif.). CD4+ T-cells were then enriched from the PBMC using negative selection with a MACS CD4+ T-cell Isolation Kit (Miltenyi Biotec, Auburn, Calif.). The enriched (>95%) CD4+ T-cells were then resuspended at a concentration of 1×10⁶ cell/ml in complete RPMI/10% FCS. Test reagents were prepared at 40 ug/ml (yielding a final concentration of 10 ug/ml) in complete RPMI/10% FCS and added in 50 un/well to flat-bottom 96-well plates (BD Falcon, San Jose, Calif.). PMA (Phorbol 12 myristate 13-acetate; A.G. Scientific, Inc., San Diego, Calif.) in complete RPMI/10% FCS was added in 50 ul/well at 4 ng/ml (final concentration of 1 ng/ml). Then T-cells in complete RPMI/10% FCS were added at a concentration of 5×10⁴ cells/well in a 50 ul volume, and finally an appropriate amount of complete RPMI/10% FCS was added to each well (typically 50 ul) to bring the final volume to 200 ul/well. The cells were treated with the test samples +/−PMA and incubated for 72 hours at 37° C. in 5% CO₂. One microliter of tritiated thymidine (Amersham Biosciences, Pisctaway, N.J.) in a 1:50 dilution of complete RPMI/10% FCS (50 ul/well) was added to the wells for the last 6 hours of culture. Plates were harvested onto a Unifilter-96, GF/C microplate (Perkin Elmer, Boston, Mass.) with a Packard Filtermate Harvester (Perkin Elmer, Boston, Mass.). Numbers are expressed as cpm and are the mean of replicate samples.

### 2.6.2. MLR Blocking Assay (Primary)

[0375] Peripheral blood mononuclear cells (PBMC) were isolated from heparinized whole blood via centrifugation over Lymphocyte Separation Media (MP Biomedicals, Aurora, Ohio), washed two times with RPMI media (Gibco-Invitrogen, Carlsbad, Calif.) and then resuspended in complete RPMI/10% FCS at a concentration of 8×10⁵/ml. WIL2-S (Manassas, Va.), a B-cell lymphoblast line, was treated with mitomycin C (Sigma Alderich, St. Louis, Mo.) to inhibit proliferation. Briefly, WIL2-S cells were resuspended in complete RPMI/10%FCS at a concentration of 5×10⁶ cells/ml and mitomycin C was added at 40 ug/ml. The cells were incubated for 40 minutes in a 37° C. water bath,then washed 3 times in complete media and resuspended at 2×10⁵ cells/ml in complete RPMI/10% FCS. Test reagents were prepared at 40 ug/ml (10 ug/ml final concentration) in complete RPMI/10% FCS and added in 50 ul/well to a 96-well flat bottom tissue culture plate (BD Falcon, San Jose, Calif.). The PBMC were then added to each well followed by the mitomycin C treated WIL2-S, and an appropriate amount of complete RPMI/10% FCS was added to each well to bring the final volume to 200 ul/well. The PBMC were tested with the test samples +/−WIL2-S and cultured for 96 hours at 37° C. in 5% CO₂. One microliter of tritiated thymidine (Amersham Biosciences, Pisctaway, N.J.) in a 1:50 dilution of complete RPMI/10% FCS (50 ul/well) was added to the wells for the last 10 hours of culture. Plates were harvested onto a Unifilter-96, GF/C microplate (Perkin Elmer, Boston, Mass.) with a Packard Filtermate Harvester (Perkin Elmer, Boston, Mass.). Numbers are expressed as cpm and are the mean of replicate samples.

### 2.6.3. MLR Blocking Assay (Secondary)

[0376] Peripheral blood mononuclear cells (PBMC) were isolated from heparinized whole blood via centrifugation over Lymphocyte Separation Media (MP Biomedicals, Aurora, Ohio), washed two times with RPMI media (Gibco-Invitrogen, Carlsbad, Calif.) and then resuspended in complete RPMI/10% FCS at a concentration of 1×10⁶/ml in a tissue culture flask. WIL2-S (Manassas, Va.), a B-cell lymphoblast line, was treated with mitomycin C (Sigma Alderich, St. Louis, Mo.) to inhibit proliferation. Briefly, WIL2-S cells were resuspended in complete RPMI/10%FCS at a concentration of 5×10⁶ cells/ml and mitomycin C was added at 40 ug/ml. The cells were incubated for 40 minutes in a 37° C. water bath, then washed 3 times in complete media and added to the isolated PBMC in the tissue culture flask at a ratio of 1:4 WIL2-S:PBMC. After one week, the primary blasts were harvested and washed twice in RPMI/10% FCS. They were then resuspended in RPMI/10% FCS at a concentration of 8×10⁵/ml. WIL2-S cells were isolated and treated with mitomycin-C as in the primary stimulation and then resuspended in RPMI/10% FCS at a concentration of 2×10⁵/ml. Test reagents were prepared at 40 ug/ml (10 ug/ml final concentration) in complete RPMI/10% FCS and added in 50u1 to a 96-well flat bottom tissue culture plate (BD Falcon, San Jose, Calif.). Appropriate amounts of complete RPMI/10% FCS were added to wells to bring the final volume (after addition of the PBMC and mitomycin C treated WIL2-S) of the wells to 200 ul. The blasts were then added to the wells in 50 ul and finally the WIL2-S in 50 ul. The blasts were tested with the test samples +/−WIL2-S and incubated for 96 hours at 37° C. in 5% CO₂. One microliter of tritiated thymidine (Amersham Biosciences, Pisctaway, N.J.) in a 1:50 dilution of complete RPMI/10% FCS (50 ul/well) was added to the wells for the last 10 hours of culture. Plates were harvested onto a Unifilter-96, GF/C microplate (Perkin Elmer, Boston, Mass.) with a Packard Filtermate Harvester (Perkin Elmer, Boston, Mass.). Numbers are expressed as cpm and are the mean of replicate samples.

### 2.7 FACS Staining Assay

[0377] Peripheral blood mononuclear cells (PBMC) were isolated from heparinized whole blood via centrifugation over Lymphocyte Separation Media (MP Biomedicals, Aurora, Ohio) and washed two times with RPMI media (Gibco-Invitrogen, Carlsbad, Calif.). CD3+ T-cells were then enriched from the PBMC using negative selection with a MACS CD3+ T-cell Isolation Kit (Miltenyi Biotec, Auburn, Calif.). The enriched (>95% CD3+ T-cells) CD3+ T-cells were then resuspended at a concentration of 4×10⁶ cell/ml in staining media, PBS (Gibco-Invitrogen) with 2% goat serum (Gemini Bioproducts, Woodland, Calif.). The test reagents were serially diluted two-fold in staining media beginning at 20 ug/ml (twice the final concentration). The test samples were plated in a 96-well “V” bottom plate (BD Falcon, San Jose, Calif.) and the enriched T-cells were then added to the wells. The control of staining media alone was also plated. The cells were incubated for 45 minutes on ice and then washed with PBS. The cells were then resuspended in 50 ul of a 1:100 dilution of PE conjugated F′2 Goat anti-Human IgG (Jackson Immunoresearch Laboratories, West Grove, Pa.) in staining media. The control of PE conjugated F′2 Goat anti-Human Ig was also added. The cells were incubated for 30 minutes in the dark on ice. They were then washed with cold PBS and resuspended in PBS with 0.1% paraformaldehyde (USB Corp, Cleveland, Ohio). The cells were then run on a FACsCalibur Flow Cytometer and analyzed with Cell Quest software (Becton Dickinson, San Jose, Calif.).

### 2.8 Surface Plasmon Resonance Analysis

[0378] Surface plasmon resonance (SPR) measurements were performed on a Biacore T100 SPR using HBS-P+ (GE Healthcare) as a running buffer. CD28-mIgG (25 μg/mL in 10 mM sodium acetate, pH 4.0) was directly immobilized onto a CM5 chip using standard amine coupling chemistry (Biacore Amine Coupling Kit, GE Healthcare), with final immobilization levels between 800 and 1900 Ru (resonance units). 2E12 binding domain constructs were injected at 25° C. or 37° C. for 150 seconds at a flow rate of 30 μl/min in a series of concentrations from 10 nM to 1 μM. Dissociation was monitored for 1200 seconds, and the surface was regenerated by injecting 50 mM NaOH for 60 seconds. Binding interactions with the surface were stable through at least 60 regeneration cycles. Data were analyzed using BiaEvaluation for the T100 software (version 2.0, GE Healthcare).

### 3. Results

### 3.1 Class 1 Interceptors

[0379] 3.1.1 Class 1 Interceptor with one N-terminal Ck-CH1 Heterodimerization Domain

[0380] Three exemplary ways of making class 1 Interceptors are shown in FIGS. 2A, 2B and 2C. X0124, X0126 and X0128 are three examples of class 1 Interceptors. To make these Interceptors, two different DNA vectors, the long chain consisting of the binding domain and the short chain with no binding domain, were co-transfected.

[0381] The X0124 Interceptor, a class 1 Interceptor with a Ck-CH1 heterodimerization domain at the amino terminus of the molecule, was made by co-transfecting X0112 and X0013. When the long chain X0112 was transfected alone, no protein was detected. Unlike the long chain, the short chain X0113 expressed well as a homodimer when transfected alone. When the long and short chains were co-transfected, a mixture of heterodimer (Interceptor) and homodimer were assembled (FIG. 3). However, the homodimer of the heavy chain was visibly absent which can be attributed to the instability of this molecule when two CH1 regions were brought together by dimerization. This was confirmed by Mass Spectrometry analysis (FIG. 4). The absence of the long chain homodimer means that the protein mixture did not contain bivalent long chain homodimers but did contain the monovalent polypeptide heterodimer.

3.1.2 Class 1 Interceptor with one C-terminal Cκ-CH1 Heterodimerization Domain

[0382] X0126 is a class 1 Interceptor, which was made by co-expressing X0114 and X0115. As with X0124, two predominant species were seen on the SDS-PAGE gel: the heterodimer (Interceptor) and the homodimer of the short chain (FIG. 5). Again, the homodimer of the long chain was visibly absence. This experiment shows that a class 1 Interceptor may be made by placing a Cκ-CH1 heterodimerization pair at the C-terminus of a single chain fusion polypeptide.

3.1.3 Class 1 Interceptor with 2 pair of Cκ-CH1 Heterodimerization Domains.

[0383] X0128 is a class I Interceptor with two Ck-CH1 pairs, one at the amino terminus of the Fc tail and another at the carboxyl terminus of the Fc tail. X0128 was made by co-expressing X0120 (comprising two CH1 regions) and X0121 (that comprising two Cκ domains). As with X0124 and X0126, the co-expression resulted in the formation of the heterodimer (Interceptor) and the homodimer of the short chain (FIG. 6). This experiment shows that a class 1 Interceptor may have a Cκ-CH1 heterodimerization pair at each end of a single chain fusion polypeptide.

3.1.4 Class 1 Interceptor with Mutations in the CH3 Domain

[0384] The effect of the interaction between the CH3 domains from different single chain fusion polypeptides on heterodimerization were examined by introducing two point mutations in the CH3 domain (F405A, Y407A) to disable CH3 interaction. Two Interceptors, X0125 and X0127, with these two point mutations were constructed. X0125 is similar to X0126 in having one CH1-Ck pair at the amino terminus, but is different in having the two CH3 mutations. X0127 is similar to X0126 in having one CH1-Ck pair in the carboxyl terminus, but is different in having the two CH3 mutations. As seen in FIGS. 7A and 7B, introducing these mutations in the CH3 domain destabilized both X0125 and X0127 molecules, resulting in a mixture of monomer of the long chain and short chain in addition to the homodimer of the short chain and the heterodimer.

[0385] X0129 was also made by co-expressing X0122 and X0123, which is a molecule similar to X0128 in that it has two CH1-Ck pairs except that it also carries the double mutations in the CH3 domain. Results similar to those with X0125 and X0127 were obtained: Both monomers of the short and long chain were formed (data not shown).

[0386] The effect of a single point mutation in CH3 (F405A or Y407A) on heterodimerization was also studied. X0138 was made by co-expressing X0136 and X0137. Both X0136 and X0137 has the single F045A mutation. As shown in FIG. 8A, monomer of the short chain seemed to be present in the protein mixture. Likewise, X0141 was made by co-expressing X0139 and X0140, both of which has the single Y407A mutation. Again, monomer of the short chain was seen in the protein sample (FIG. 8B).

[0387] Thus, it appears that the CH3 domain contributes but is not essential for the formation the polypeptide heterodimers of this disclosure.

### 3.1.5 ELISA Assay for Interceptors Binding to CD28 mIg

[0388] Various Interceptors containing 2E12 scFv binding domain specific for CD28 (X0124, X0125, X0126, X0127, X0128 and X0129) were tested in an ELISA by adding the proteins to CD28mIg coated plates and detecting binding with either anti-human IgG HRP conjugates or with anti-human Cκ HRP conjugates. As shown in FIG. 9, all the Interceptors bound to the specific CD28 target. The control molecule, X0113, the homodimer of the short chain with no binding domain, did not bind, whereas the bivalent SMIP protein form of 2E12 bound strongly as expected. When detected using anti-human Cκ HRP conjugates (FIG. 10), all the Interceptors binding to CD28mIg were detected since they all have the Cκ domain, but the bivalent SMIP protein, M0039, was not detected due to the absence of the Cκ domain.

### 3.1.6 Second Step Purification of Class 1 Interceptors

[0389] As a second step purification, a cation exchange column (MonoS) was used to separate the heterodimer from the homodimer. Two peaks eluted from the column following a salt gradient treatment after loading with X0124 (FIG. 11). Fractions containing the 2 peaks were examined by SDS-PAGE. The Interceptor molecule seemed to present in the second peak. FIG. 12 is the SDS-PAGE analysis of X0124 before the column purification and X0124 peak 2. It seemed that the X0124 heterodimer was enriched to about 80% and this result was verified by mass spectrometry analysis.

[0390] A Protein L agarose column was also used as a second step purification of X0124 and X0126. FIG. 13 show that reasonably pure heterodimer was obtained when Protein L was used as a second purification step.

3.1.7 Class 1 Interceptors with Cλ/CH1 Pair.

[0391] Cκ in two of the Class 1 Interceptors, X0124 and X0126, was replaced with Cλ to give X0142 and X0143, respectively (FIG. 14). In both cases, similar to the Cκ containing polypeptides, homodimer of the short chain and heterodimer were formed (FIG. 15).

3.1.8 Class 1 Interceptor with two Cκ/CH1 Pairs with Each Chain Having 1 CH1 and 1 Ck Domain.

[0392] X0132 was formed by expressing X0130 and X0131. X0132 is unique in that the long chain has a binding domain and CH1 at the amino terminus and a Cκ at the carboxyl terminus of the Fc region portion, whereas the short chain has a Cκ at the amino terminus and a CH1 at the carboxyl terminus of the Fc region portion. Expression of the heavy chain alone yielded no protein, whereas expression of the light chain alone only produced very little protein. Interestingly, co-expression of the two chains resulted in reasonable production of protein (FIG. 16). If the long and short chain was co-expressed at a ratio of 2:1, very pure heterodimer was obtained (FIG. 17). Mass spectrometry analysis confirmed this by showing that neither the short chain nor the long chain homodimers were present (FIG. 18).

[0393] Interceptors with two CL/CH1 pairs that use a combination of Cκ and Cλ were also prepared (FIG. 19). In each case, only one CH1 and only one Cκ or Cλ is on each chain. These Interceptors X0166, X0165 and X0149 seemed to behave like X0132 in forming almost exclusively heterodimer (FIG. 20) when transfected at a ratio of 2 long chain to 1 short chain. This experiment further illustrated that Cλ may be used interchangeably in place of Cκ. The SEC analysis as shown in FIG. 21 illustrated that these Interceptors are 100% protein of interest (POI), which indicates that the formation of the heterodimer was very efficient.

### 3.1.9 FACS Binding Data for Interceptors and Other Molecular Formats

[0394] Binding of selected Interceptors, X0124, X0128 and X0132, to Jurkat cells were compared with the 2E12 binding domain expressed in other formats. As expected from the monovalent binding property of the Interceptors, they all bound less strongly than the bivalent 2E12 molecules (SMIP or huIgG) (FIG. 22)

### 3.1.10 Biological Assays on Selected Class 1 Interceptors

[0395] The Interceptors were tested in the following biological assays: primary MLR, secondary MLR and PMA assays. In the primary MLR assay (FIG. 23), all the Interceptors tested were able to block T cell response as well as other 2E12 molecular formats. X0124 in particular was able to block T cell response at the same level as the CTLA4-Ig molecule, which was used as a positive control.

[0396] In the secondary MLR assay (FIG. 24), there was some differentiation observed—the bivalent 2E12 SMIP proteins activated the secondary T cell response whereas Interceptors blocked the response, like the control CTLA4-Ig molecule.

[0397] In the PMA assay (FIG. 25), T cells were purified from PBMC and the different 2E12 Interceptors and other 2E12 molecules were added in the presence of a suboptimal concentration of PMA (1 ng/ml). The result shows that the bivalent 2E12 molecules, such as the 2E12 SMIP protein and 2E12 huIg (also referred to as Mab or monoclonal antibody), were able to synergize with PMA in stimulating the purified T cells, whereas the Interceptors and other monovalent 2E12 molecules (like the Fab and scFv) did not.

### 3.1.11 Biophysical Characterization of Interceptors

[0398] Surface plasmon resonance was used to measure binding of immobilized CD28 by 2E12 binding domain constructs. The results show that binding kinetics of the monovalent 2E12 constructs (e.g., 2E12 Fab, FIGS. 26A-26D) fit well to a 1:1 Langmuir binding model (Table 5). Binding kinetics of the bivalent 2E12 constructs (e.g., 2E12 mAb, FIGS. 27A-27B) to immobilized CD28 could not be fit to a 1:1 Langmuir binding model, but could be fit with high accuracy to a bivalent analyte binding model (Table 5). Equilibrium dissociation constants (1(D) could be calculated with high accuracy for each construct by fitting the observed response at saturation to a steady-state equilibrium model (Table 5).

TABLE 5
Binding Kinetics to immobilized CD28†

| | | | | | | Equilib- |
|---|---|---|---|---|---|---|
| | k_{a (I)} | k_{d (I)} | K_{D} | k_{a (II)} | k_{d (II)} | rium |
| Protein | (×10⁵) | (×10⁻³) | (nM) | (×10⁻³) | (×10⁻³) | K_{D} (nM) |
| 2E12 Fab | 4.6 | 2.4 | 5.24 | — | — | 28.5 |
| 2E12 mAb | 1.76 | 1.04 | 6* | 3.67 | 12.7 | 11.4 |
| 2E12 scFv | 3.48 | 3.38 | 9.69 | — | — | 39.6 |
| 2E12 SMIP | 1.7 | 4.11 | 24.2* | 0.138 | 0.3 | 19.4 |
| (M0039) | | | | | | |
| Heterodimer | 1.41 | 4.97 | 35.2 | — | — | 104 |
| 1 (X0124) | | | | | | |
| Heterodimer | 1.49 | 6.5 | 43.7 | — | — | 134 |
| 2 (X0132) | | | | | | |

†kₐ is in M⁻¹ s⁻¹, k_{d} in s⁻¹.
k_{a(I)} and kd_{(I)} are the on and off rates in a 1:1 binding model, and the first on and off rates in a bivalent analyte model.
k_{a (II)} and k_{d (II)} are the second set of on and off rates (arising from avidity) in a bivalent analyte model.
K_{D} is the kinetic dissociation constant determined from the ratio of on and off rates (kd (I)/ka (I)). Kinetic KD values shown for the bivalent analyte model (*) represent initial binding at the first site only.
Equilibrium K_{D} is the equilibrium dissociation constant.

[0399] The results show that first-site binding kinetics of all formats to CD28, are similar and within the same order of magnitude. The 2E12 binding domain bound two-fold more efficiently in the Fab format than as an scFv. This difference was reflected in the two-fold affinity difference between the mAb (containing two Fabs) and SMIP (containing two scFvs) formats. Heterodimeric polypeptides (X0124, X0132) bearing one binding domain bound monovalently to immobilized CD28, confirming that only one binding domain was displayed in the heterodimeric construct. The binding kinetics of heterodimeric polypeptides were similar to first-site binding of the SMIP format, suggesting that any steric penalty to binding of the scFv arising from attachment to a larger protein is the same between the two formats.

### 3.2 Class 2 Interceptors

[0400] A class 2 Interceptor (X0171) where the binding domain was placed on the backend of the molecule was made. This molecule has 2 CH1-Ck pairs and the 2E12 scFv is located at the C-terminus of CH1 via an NKG2D linker. FIG. 28 shows the SDS-PAGE results of X0171 and FIG. 29 illustrates the mass spectrum of X0171, showing that the polypeptide heterodimer was the predominant species.

### 3.3 Cation Exchange Chromatographic Analysis of Interceptors

[0401] Analytical separation of homodimeric and heterodimeric molecules was attained by standard cation exchange chromatography (FIG. 30), with homodimeric molecules eluting at a lower salt concentration than heterodimeric molecules. As is typical with ion exchange chromatography, different charge states of the same molecule eluted at different salt concentrations, thus multiple peaks were occasionally observed for either homodimeric or heterodimeric molecules.

[0402] This assay confirmed the efficacy of reversing the orientation of the CH1/Cκ or CH1/Cλ pair on the long single chain fusion polypeptide relative to the short single chain fusion polypeptide (X0132, X0171, X0172, FIG. 31) and that a secondary Protein L affinity purification step (X0124, FIG. 31) was effective at highly enriching the heterodimer population.

### 3.4 Mutated Interceptors

[0403] As shown herein, pure or substantially pure (over 90% or 95% pure) heterodimers were obtained with Interceptors having one CH1-Cκ (or Cλ) pair using a secondary purification via ion exchange or protein L affinity chromatography. Alternatively, substantially pure (over 90% or 95% pure) heterodimers were obtained with Interceptors having two CH1-Cκ (Cλ) pairs and using excess long chain DNA during the transfection step, which did not require a secondary purification. However, the Interceptors with two CH1-Cκ (Cλ) pairs have higher molecular weights than those with one CH1-Cκ (Cλ) pair by about 23 kDa.

[0404] Alternative embodiments were considered that have one, two or all of the following characteristics: first, it uses only one CH1-Cκ (Cλ) pair to reduce the size of the molecule to the minimum; second, it forms pure or substantially pure (over 90% or 95% pure) heterodimer to avoid secondary purification; and lastly, this heterodimerization is compatible with null mutations in the Fc domains if effector function is not needed.

[0405] The crystal structure of Ck-Ck versus Ck-CH1 (FIG. 32) shows that the homodimer interface formed by Ck and Ck is different from the heterodimer interface of Ck-CH1 and that the inter-hydrogen network at the Ck-Ck interface (FIGS. 33 and 34) is not present in the Ck-CH1 interface. The differences were used to introduce rational mutations that could destabilize the Ck-Ck interface without affecting the Ck-CH1 interface.

[0406] Seven residues that were identified as forming the inter-hydrogen bonding network at the Ck-Ck interface (N29, N30, Q52, V55, T56, S68 and T70) were mutated to alanine residues on the X0113 chain. X0112 and X0113 were co-expressed and proteins examined on SDS-PAGE to determine relative ratio of heterodimer and short chain homodimer. FIG. 35 shows that the expression level for all the mutants seemed to be comparable to the wild type X0124 and that the V55A mutation seemed to slightly favor the heterodimer species.

[0407] Double alanine mutations were next introduced on X0113 with V55A being one of the fixed mutations. FIG. 36 shows that the X0124 V55A T70A mutants seemed to have improved heterodimerization. Triple alanine mutations were also introduced which would remove 3 or 4 of the hydrogen bonds in the interface. As shown in FIG. 37, there was slight improvement in the heterodimerization for three of four triple mutants tested.

[0408] Bulky side chain amino acid mutations were also introduced individually at four of the interface residues: Q52, T56, S68 and T70, with arginine (R) or trytophan (W) replacing the wild type residues at these positions. FIG. 38 shows that a couple of these single point mutants might help heterodimerization, but some may unexpectedly promote homodimerization.

[0409] A wider range of bulky side chain amino acid mutations were also introduced into these positions (N29, N30, Q52, V55, S68, and T70) and combined that with alanine mutations elsewhere. FIGS. 39 and 40 show that seven of the mutants appeared to be beneficial in destabilizing homodimer formation and resulting in a significantly higher percentage of heterodimer formation (greater than 90% heterodimer in some cases). These mutations are as follows: (1) N29W,V55A,T70A (SEQ ID NO:91), (2) N29Y,V55A,T70A (SEQ ID NO:92), (3) T70E, N29A,N30A,V55A (SEQ ID NO:193), (4) N30R,V55A,T70A (SEQ ID NO:98), (5) N30K,V55A,T70A (SEQ ID NO:99), (6) N30E, V55A,T70A (SEQ ID NO:101) and (7) V55R,N29A,N30A (SEQ ID NO:103). These results show that beneficial mutations can include bulky amino acids at positions 29, 30, 55 or 70 in combination with other mutations that disrupt CL homodimerization.

[0410] Additional bulky side chain amino acid mutations in combination with alanine mutations at positions 29, 30, 55 or 70 were further investigated (see, Table 6). The SDS-PAGE (non-reducing condition) results (FIG. 41, left panel) shows that for 2E12 binding domain, 4 mutations [WYAE (N29W N30Y V55A T70E) and YYAE (N29Y N30Y V55A T70E)] on the Ck domain can result in near 100% heterodimerization, whereas triple mutations [EAE (N30E V55A T70E) and YAE (N30Y V55A T70E))] result in over 90% heterodimerization. For the P2C2 binding domain (FIG. 41, left panel), it appeared that a triple mutation (particularly YAE) is sufficient to achieve close to 100% heterodimerization. Constructs containing the mutated Ck heterodimerization domain at the C-terminus of the CH2 and CH3 domains achieved over 90% heterodimerization (FIG. 41, right panel).

TABLE 6
Mutated Interceptors

| Interceptors | Name | Chain 1 | Chain 2 |
|---|---|---|---|
| Front end 2E12 wt | X0124 | X0112 (SEQ ID NO: 22) | X0113 (SEQ ID NO: 24) |
| WYAE (N29W N30Y V55A | X0232 | X0112 (SEQ ID NO: 22) | X0229 (SEQ ID NO: 127) |
| T70E) | | | |
| YYAE (N29Y N30Y V55A | X0233 | X0112 (SEQ ID NO: 22) | X0231 (SEQ ID NO: 129) |
| T70E) | | | |
| EAE (N30E V55A T70E) | X0211 | X0112 (SEQ ID NO: 22) | X0193 (SEQ ID NO: 131) |
| YAE (N30Y V55A T70E) | X0224 | X0112 (SEQ ID NO: 22) | X0220 (SEQ ID NO: 133) |
| Front End P2C2 wt | X0235 | X0234 (SEQ ID NO: 135) | X0113 (SEQ ID NO: 24) |
| YAE (N30Y V55A T70E) | X0236 | X0234 (SEQ ID NO: 135) | X0220 (SEQ ID NO: 133) |
| EAE (N30E V55A T70E) | X0237 | X0234 (SEQ ID NO: 135) | X0193 (SEQ ID NO: 131) |
| Back end 2E12 wt | X0126 | X0115 (SEQ ID NO: 26) | X0114 (SEQ ID NO: 28) |
| Back end YAE (N30Y | X0238 | X0115 (SEQ ID NO: 26) | X0225 (SEQ ID NO: 137) |
| V55A T70E) | | | |

### Example 2

### C-Met Specific Interceptor Blocks HGF-Induced Phosphorylation of C-Met

[0411] The 5D5 binding domain inhibits the activation of the human c-Met receptor tyrosine kinase by its ligand, known as hepatocyte growth factor or scatter factor (HGF) (Jin et al. (2008) Cancer Research 68:4360-4368). The 5D5 hybridoma was converted to the corresponding SMIP and Interceptor scaffolds, and tested for the ability to inhibit HGF-induced receptor activation. The 5D5 Interceptor was formed by coexpressing a first single chain polypeptide that comprises from its amino-terminus to carboxy-terminus, 5D5scFv, human IgG1 CH1, human IgG1 CH2, human IgG1 CH3, and human Cκ as set forth in SEQ ID NO:139 and a second single chain polypeptide, X0131, that comprises from its amino-terminus to carboxy-terminus, human IgG1 Cκ, human IgG1 CH2, human IgG1 CH3, and human CH1 as set forth in SEQ ID NO:48.

[0412] To measure the ability of our molecules to block HGF-induced phosphorylation of c-MET, approximately 30,000 HT-29 cells were plated per well in a 96-well plate in RPMI 1640 +10% Fetal Bovine Serum (FBS). The following day, media was aspirated, and cells were treated with 50 μl of blocking solution diluted in RPMI 1640 without FBS for 1 hour at 37° C. Aspirated blocking treatments were aspirated, and 50 μl of mock treatment (RPMI 1640, 1 mM activated sodium orthovanadate) or rhHGF treatment (RPMI 1640, 1 mM activated sodium orthovanadate, 5 nM rhHGF) was added. The resulting mixture was incubated for 10 min. at room temperature. Media was aspirated again and cells were lysed in ice-cold 1X Sample Diluent Concentrate 2 supplemented with 1 mM activated sodium orthovanadate, 1X Halt™ Protease Inhibitors and 1X Halt™ Phosphatase Inhibitors. Lysates were frozen at −20° C. before analysis on the DuoSet IC Human Phospho-HGF R/c-MET ELISA, according to manufacturer's instructions. The 1 mM activated sodium orthovanadate included in the mock and rhHGF treatments prevents dephosphorylation of c-MET in the absence of rhHGF, leading to higher levels of background phosphorylation on the c-MET receptor than would be observed if a lower concentration of activated sodium orthovanadate had been used in the treatments.

[0413] rhHGF, Sample Diluent Concentrate 2, and the DuoSet IC Human Phospho-HGF R/c-MET ELISA were purchased from R&D Systems (Minneapolis, Minn.). Halt™ Protease and Phosphatase Inhibitor Cocktails were purchased from Thermo Fisher Scientific (Rockford, Ill.). The HT-29 cell line was obtained from the American Type Culture Collection (ATCC, Manassas, Va.).

[0414] Both the 5D5 SMIP and the 5D5 Interceptor showed dose-dependent inhibition of c-Met phosphorylation in response to HGF treatment, with the (bivalent) 5D5 SMIP showing efficient suppression of c-Met phosphorylation at a concentration of 1.4 nM, and the (monovalent) 5D5 Interceptor showing efficient suppression of phosphorylation at a concentration of 12 nM (FIG. 42).

### Example 3

### Polypeptide Heterodimers having Mutated Ck Domains

[0415] Several additional polypeptide heterodimers having mutated Ck domains were made.

[0416] Polypeptide heterodimer X0306 comprises single chain polypeptides X0303 and X0294. Single chain polypeptide X0303 comprises from its amino to carboxyl terminus: humanized Cris-7 (anti-CD3) (VH3-VL1) scFv, human IgG1 SCC-P hinge, mutated human IgG1 CH2 having alanine at positions 234, 235, 237, 318, 320, and 322, human IgG1 CH3, and human CH1. The nucleotide and amino acid sequences of X0303 are set forth in SEQ ID NOS: 764 and 769, respectively. Single chain X0294 comprises from its amino to carboxyl terminus: human IgG1 SCC-P hinge, mutated human IgG1 CH2 having alanine at positions 234, 235, 237, 318, 320, and 322, human IgG1 CH3, and mutated human Ck that does not contain its carboxyl-terminal cysteine and contains N30D V55A T70E substitutions (DAE). The nucleotide and amino acid sequences of X0294 are set forth in SEQ ID NOS:760 and 765, respectively.

[0417] Polypeptide heterodimer X0308 comprises single chain polypeptides X0303 and X0296. Single chain polypeptide X0296 comprises its amino to carboxyl terminus: human IgG1 SCC-P hinge, mutated human IgG1 CH2 having alanine at positions 234, 235, 237, 318, 320, and 322, human IgG1 CH3, and mutated human Ck that does not contain its carboxyl-terminal cysteine and contains N30M V55A T70E substitutions (MAE). The nucleotide and amino acid sequences of X0296 are set forth in SEQ ID NOS:761 and 766, respectively.

[0418] Polypeptide heterodimer X0309 comprises single chain polypeptides X0303 and X0297. Single chain polypeptide X0297 comprises its amino to carboxyl terminus: human IgG1 SCC-P hinge, mutated human IgG1 CH2 having alanine at positions 234, 235, 237, 318, 320, and 322, human IgG1 CH3, and mutated human Ck that does not contain its carboxyl-terminal cysteine and contains N30S V55A T70E substitutions (SAE). The nucleotide and amino acid sequences of X0297 are set forth in SEQ ID NOS:762 and 767, respectively.

[0419] Polypeptide heterodimer X0308 comprises single chain polypeptides X0303 and X0298. Single chain polypeptide X0298 comprises its amino to carboxyl terminus: human IgG1 SCC-P hinge, mutated human IgG1 CH2 having alanine at positions 234, 235, 237, 318, 320, and 322, human IgG1 CH3, and mutated human Ck that does not contain its carboxyl-terminal cysteine and contains N30F V55A T70E substitutions (FAE). The nucleotide and amino acid sequences of X0298 are set forth in SEQ ID NOS:763 and 768, respectively.

[0420] Polypeptide heterodimers X0306, X0308, X0309 and X0310 were expressed according to Example 1. The following expression levels were obtained: 26.8 μg protein/mL of culture for heterodimer X0306, 13.3 μg protein/mL of culture for heterodimer X0308, 18.9 μg protein/mL of culture for heterodimer X0309, and 5.9 μg protein/mL of culture for heterodimer X0310.

### Example 4

### Polypeptide Heterodimers Having Mutated CH1 and Ck Domains for Forming Salt Bridges

[0421] Several additional polypeptide heterodimers having mutated CH1 and Ck domains for forming salt bridges were made.

[0422] Polypeptide heterodimer X0311 comprises single chain polypeptides X0299 and X0302. Single chain polypeptide X0299 comprises from its amino to carboxyl terminus: human IgG1 SCC-P hinge, mutated human IgG1 CH2 having alanine at positions 234, 235, 237, 318, 320, and 322, human IgG1 CH3, and mutated human Ck that does not contain its carboxyl-terminal cysteine and contains an L29E substitution. The nucleotide and amino acid sequences of X0299 are set forth in SEQ ID NOS:774 and 778, respectively. Single chain polypeptide X0302 comprises from its amino to carboxyl terminus: humanized Cris-7 (anti-CD3) (VH3-VL1) scFv, human IgG1 SCC-P hinge, mutated human IgG1 CH2 having alanine at positions 234, 235, 237, 318, 320, and 322, human IgG1 CH3, and mutated human CH1 having a V68K substitution. The nucleotide and amino acid sequences of X0302 are set forth in SEQ ID NOS:777 and 781, respectively.

[0423] Polypeptide heterodimer X0312 comprises single chain polypeptides X0300 and X0301. Single chain polypeptide X0300 comprises from its amino to carboxyl terminus: human IgG1 SCC-P hinge, mutated human IgG1 CH2 having alanine at positions 234, 235, 237, 318, 320, and 322, human IgG1 CH3, and mutated human Ck that does not contain its carboxyl-terminal cysteine and contains an L29K substitution. The nucleotide and amino acid sequences of X0300 are set forth in SEQ ID NOS:775 and 779, respectively. Single chain polypeptide X0301 comprises from its amino to carboxyl terminus: humanized Cris-7 (anti-CD3) (VH3-VL1) scFv, human IgG1 SCC-P hinge, mutated human IgG1 CH2 having alanine at positions 234, 235, 237, 318, 320, and 322, human IgG1 CH3, and mutated human CH1 having a V68E substitution. The nucleotide and amino acid sequences of X0301 are set forth in SEQ ID NOS:776 and 780, respectively.

[0424] Polypeptide heterodimers X0311 and X0312 were expressed according to Example 1. The following expression levels were obtained: 32 μg protein/mL of culture for heterodimer X0311 and 38 μg protein/mL of culture for heterodimer X0312.

[0425] The various embodiments described above can be combined to provide further embodiments. All of the patents, patent application publications, patent applications, and non-patent publications referred to in this specification and/or listed in the Application Data Sheet, are incorporated herein by reference, in their entirety. Aspects of the embodiments can be modified to employ concepts of the various patents, applications and publications to provide yet further embodiments.

[0426] These and other changes can be made to the embodiments in light of the above-detailed description. In general, the terms used in the claims should not be construed to limit the claims to the specific embodiments disclosed in the specification or recited in the claims, but should be construed to include all possible embodiments and the full scope of equivalents to which such claims are entitled. Accordingly, the claims are not limited by this disclosure.

1. A polypeptide heterodimer, comprising:
(a) a first single chain polypeptide comprising a binding domain that specifically binds a target, a hinge, a first immunoglobulin heterodimerization domain, and an Fc region portion; and
(b) a second single chain polypeptide comprising a hinge, a second immunoglobulin heterodimerization domain that is not the same as the first immunoglobulin heterodimerization domain of the first single chain polypeptide, and an Fc region portion;
wherein the first and second immunoglobulin heterodimerization domains associate with each other to form a polypeptide heterodimer comprised of the first and the second single chain polypeptides, and wherein
(i) the first immunoglobulin heterodimerization domain comprises a first immunoglobulin CH1 region and the second immunoglobulin heterodimerization domain comprises a first immunoglobulin CL region, or,
(ii) the first immunoglobulin heterodimerization domain comprises a first immunoglobulin CL region and the second immunoglobulin heterodimerization domain comprises a first immunoglobulin CH1 region, and
wherein the Fc region portion comprises an immunoglobulin CH2 domain of IgG1, IgG2, IgG3, IgG4, IgA1, IgA2, IgD, or any combination thereof; an immunoglobulin CH2 domain and CH3 domain of IgG1, IgG2, IgG3, IgG4, IgA1, IgA2, IgD, or any combination thereof; an immunoglobulin CH3 domain of IgG1, IgG2, IgG3, IgG4, IgA1, IgA2, IgD, IgE, IgM, or any combination thereof; or an immunoglobulin CH3CH4 domain of IgE, IgM, or a combination thereof.

2. The polypeptide heterodimer of claim 1, wherein the binding domain is a single chain Fv (scFv).

3. The polypeptide heterodimer of claim 1, wherein the binding domain is amino terminal to the Fe region portion.

4. The polypeptide heterodimer of claim 1, wherein the binding domain is carboxyl terminal to the Fe region portion.

5. The polypeptide heterodimer of claim 1, wherein the binding domain specifically binds to c-Met, RON, CD3, CEACAM6, EGFR, ErbB3, ErbB4, EphA2, GITR, IGFIR, GHRHR, GHR, FLT1, KDR, FLT4, CD44v6, CD151, TGFBR2, TGFBR1, IL6R, gp130, TNFR1, TNFR2, PD1, PD-L1, PD-L2, BTLA, HVEM, RANK, TNFRSF4, CD40, CD137, TWEAK-R, LTfβR, LIFRβ, OSMRβ, TCRα, TCRβ, CD19, CD28, CD80, CD81, CD86, TLR7, TLR9, PTCH1, LRP5, Frizzled-1, or Robo1.

6. The polypeptide heterodimer of claim 1, wherein the first immunoglobulin heterodimerization domain comprises the first immunoglobulin CH1 region and the second immunoglobulin heterodimerization domain comprises the first immunoglobulin CL region.

7. (canceled)

8. (canceled)

9. The polypeptide heterodimer of claim 6 wherein the first single chain polypeptide further comprises a second CH1 region and the second single chair polypeptide further comprises a second CL region, and wherein the second CH1 region of the first single chain polypeptide and the second CL region of the second single chain polypeptide associate with each other in the polypeptide heterodimer.

10-12. (canceled)

13. The polypeptide heterodimer of claim 1, wherein the first immunoglobulin heterodimerization domain comprises a first immunoglobulin CL region and the second immunoglobulin heterodimerization domain comprises a first immunoglobulin CH1 region.

14. (canceled)

15. (canceled)

16. The polypeptide heterodimer of claim 13 wherein the first single chain polypeptide further comprises a second CL region and the second single chain polypeptide further comprises a second CH1 region, and wherein the second CL region of the first single chain polypeptide and the second CH1 region of the second single chain polypeptide associate with each other in the polypeptide heterodimer.

17-19. (canceled)

20. The polypeptide heterodimer of claim 6 wherein the first single chain polypeptide further comprises a second CL region and the second single chain polypeptide further comprises a second CH1 region, and wherein the second CL region of the first single chain polypeptide and the second CH1 region of the second single chain polypeptide associate with each other in the polypeptide heterodimer.

21-26. (canceled)

27. The polypeptide heterodimer of claim 1, wherein the e first CL region is a 78 region or a Cλ region.

28-30. (canceled)

31. The polypeptide heterodimer of claim 27, wherein the Cκ region is a wild type human immunoglobulin 78 region.

32. The polypeptide heterodimer of claim 27, wherein the Cκ region is an altered human immunoglobulin Cκ region in which one or more amino acids of a wild type human Cκ region are substituted at N29, N30, Q52, V55, T56, S68, or T70.

33. (canceled)

34. The polypeptide heterodimer of claim 27, wherein the CH1 region is an altered human immunoglobulin CH1 region comprising an amino acid substitution by which Val (V) at position 68 is substituted by Lys (K), Arg (R) or His (H), and wherein the Cκ region is an altered human immunoglobulin Cκ region comprising an amino acid substitution by which Leu (L) at position 27 is substituted by Asp (D) or Glu (E).

35. The polypeptide heterodimer of claim 27, wherein the CH1 region is an altered human immunoglobulin CH1 region comprising an amino acid substitution by which Val (V) at position 68 is changed to Asp (D) or Glu (F), and wherein the Cκ region is an altered human immunoglobulin Cκ region comprising an amino acid substitution by which Leu (L) at position 2729 is changed to Lys (K), Arg (R) or His (H).

36. (canceled)

37. (canceled)

38. The polypeptide heterodimer of claim 1, wherein the first CH 1 region an altered human immunoglobulin CH1 region with the cysteine of a wild type human immunoglobulin CH1 region that is involved in forming a disulfide bond with a wild type human immunoglobulin CL region is deleted or substituted.

39. (canceled)

40. (canceled)

41. The polypeptide heterodimer of claim 38, wherein the first CH1 region is a polypeptide comprising SEQ ID NO: 114.

42. The polypeptide heterodimer of claim 27, wherein the Cκ region is selected from polypeptides comprising SEQ ID NOS:141-178 and 202.

43. The polypeptide heterodimer of claim 27, wherein the Cλregion is a polypeptide comprising SEQ ID NO: 140.

44. The polypeptide heterodimer of claim 1, wherein the Fc region portion comprises an immunoglobulin CH2 domain.

45-49. (canceled)

50. The polypeptide heterodimer of claim 1, wherein the Fc region portion comprises an immunoglobulin CH12 domain and an immunoglobulin CH3 domain.

51-57. (canceled)

58. The polypeptide heterodimer of claim 1, wherein the hinge of both the first and second single chain polypeptides is an immunoglobulin hinge region.

59-61. (canceled)

62. The polypeptide heterodimer of claim 58, wherein the immunoglobulin hinge region is
(a) present amino terminal to the Fe region portion,
disposed between the binding domain and the immunoglobulin heterodimerization domain.
(c) disposed between the immunoglobulin heterodimerization domain and the Fc region portion, or
(d) at the amino terminus of the first or second single chain polypeptide.

63-67. (canceled)

68. The polypeptide heterodimer of claim 1, wherein the hinges of the first and second single chain polypeptides are different.

69. The heterodimer of claim 1, wherein the first single chain polypeptide comprises amino acids 21-609 of SEQ ID NO:26, and the second single chain polypeptide comprises amino acids 21-363 of SEQ ID NO: 137; the first single chain polypeptide comprises amino acids 21-716 of SEQ ID NO:46, and the second single chain polypeptide comprises amino acids 21-461 of SEQ ID NO:48; the first single chain polypeptide comprises amino acids 21-716 of SEQ ID NO:46 and the second single chain polypeptide comprises amino acids 21-461 of SEQ ID NO:64, the first single chain polypeptide comprises amino acids 21-716 of SEQ ID NO:62, and the second single chain polypeptide comprises amino acids 21-461 of SEQ ID NO:48; or the first single chain polypeptide comprises amino acids 21-716 of SEQ ID NO:62, and the second single chain polypeptide comprises amino acids 21-461 of SEQ ID NO:64; the first single chain polypeptide comprises SEQ ID NO: 139, and the second single chain polypeptide comprises amino acids of 21-461 of SEQ ID NO:48; the first single chain polypeptide comprises SEQ ID NO: 263, and the second single chain polypeptide comprises amino acids of 21-461 of SEQ ID NO:48; the first single chain polypeptide comprises SEQ ID NO:267, and the second single chain polypeptide comprises amino acids of 21-461 of SEQ ID NO:48, the first single chain polypeptide comprises SEQ ID NO:769, and the second single chain polypeptide comprises SEQ ID NO:765; the first single chain polypeptide comprises SEQ ID NO:769, and the second single chain polypeptide comprises SEQ ID NO:766; the first single chain polypeptide comprises SEQ ID NO:769, and the second single chain polypeptide comprises SEQ ID NO:767; the first single chain polypeptide comprises SEQ ID NO:769, and the second single chain polypeptide comprises SEQ ID NO:768; the first single chain polypeptide comprises SEQ ID NO:781, and the second single chain polypeptide comprises SEQ ID NO:778; and the first single chain polypeptide comprises SEQ ID NO:780; and the second single chain polypeptide comprises SEQ ID NO: 779.

70. The heterodimer of claim 1, wherein the first single chain polypeptide comprises amino acids 21-609 of SEQ ID NO:22 or 21-595 of SEQ ID NO: 135, and the second single chain polypeptide comprises SEQ ID NO:91, 92, 193. 98, 99, 101, or 103, or amino acids 21-361 of SEQ ID NO: 129, 131 or 133.

71. (canceled)

72. A composition comprising a polypeptide heterodimer of claim 1 and a pharmaceutically acceptable excipient.

73. An expression vector capable of expressing the polypeptide heterodimer of claim 1, comprising a first polynucleotide encoding the first single chain polypeptide and a second polynucleotide encoding the second single chain polypeptide.

74. A host cell comprising the expression vector of claim 73.

75. A host cell comprising first and second expression vectors capable of expressing the first and second single chain polypeptides, respectively, of the polypeptide heterodimer of claim 1.

76. A method for making a polypeptide heterodimer, comprising
(a) culturing a host cell of claim 74 under conditions suitable to express first and second single chain polypeptides, and
(b) optionally isolating or purifying the heterodimers formed from the first and second single chain polypeptides from the culture.

77. A method for reducing T cell activation, comprising administering to a patient in need thereof an effective amount of a heterodimer of claim 1, wherein the binding domain specifically binds CD28.

78. A method for inhibiting growth of a solid malignancy, comprising administering to a patient in need thereof an effective amount of a heterodimer of claim 1, wherein the binding domain specifically binds EGFR, ErbB3, ErbB4, c-Met, RON, CEACAM6, EphA2, IGF1R, GHRHR, GHR, VEGFR1, VEGFR2, VEGFR3, CD44v6, CD151, TGFBR2, IL6R, gp130, TNFR2, PD1, TWEAK-R, OSMRbeta, Patched-1, Frizzled, or Robo1.

79. A method for treating an autoimmune or inflammatory condition, comprising administering to a patient in need thereof an effective amount of a heterodimer according to claim 1, wherein the binding domain specifically binds TGFBR2, TGFBR1, IL6R, gp130, TNFR1, TNFR2, PD1, HVEM, OX40, CD40, CD137, TWEAK-R, LTβR, LIFRβ, OSMRβ, CD3, TCRα, TCRβ, CD19, CD28, CD80, CD81, CD86, TLR7, or TLR9.

80-83. (canceled)

The application's sequence listing, which the Patent Office published only in electronic form, follows.

SEQUENCE LISTING (889 sequences)

SEQ ID NO: 1 - DNA, 1530 bp, Artificial Sequence
  Anti-CD28 SMIP (M0039)
  sig_peptide (1)...(66)
atggattttcaagtgcagattttcagcttcctgctaatcagtgcttcagtcataatgtccagaggagtccaggtgcagctgaaggagtcaggacctggcctggtggcgccctcacagagcctgtccatcacatgcaccgtctcagggttctcattaaccggctatggtgtaaactgggttcgccagcctccaggaaagggtctagagtggctgggaatgatatggggtgatggaagcacagactataattcagctctcaaatccagactatcgatcaccaaggacaactccaagagccaagttttcttaaaaatgaacagtctgcaaactgatgacacagccagatactactgtgctcgagatggttatagtaactttcattactatgttatggactactggggtcaaggaacctcagtcaccgtctcctctgggggtggaggctctggtggcggtggatccggcggaggtgggtcgggtggcggcggatctgacattgtgctcacccaatctccagcttctttggctgtgtctctaggtcagagagccaccatctcctgcagagccagtgaaagtgttgaatattatgtcacaagtttaatgcagtggtaccaacagaaaccaggacagccacccaaactcctcatctctgctgctagcaacgtagaatctggggtccctgccaggtttagtggcagtgggtctgggacagactttagcctcaacatccatcctgtggaggaggatgatattgcaatgtatttctgtcagcaaagtaggaaggttccatggacgttcggtggaggcaccaagctggaaatcaaacgtgatcaggagcccaaatcttctgacaaaactcacacatccccaccgtccccagcacctgaactcctggggggaccgtcagtcttcctcttccccccaaaacccaaggacaccctcatgatctcccggacccctgaggtcacatgcgtggtggtggacgtgagccacgaagaccctgaggtcaagttcaactggtacgtggacggcgtggaggtgcataatgccaagacaaagccgcgggaggagcagtacaacagcacgtaccgtgtggtcagcgtcctcaccgtcctgcaccaggactggctgaatggcaaggagtacaagtgcaaggtctccaacaaagccctcccagcccccatcgagaaaacaatctccaaagccaaagggcagccccgagaaccacaggtgtacaccctgcccccatcccgggatgagctgaccaagaaccaggtcagcctgacctgcctggtcaaaggcttctatcccagcgacatcgccgtggagtgggagagcaatgggcagccggagaacaactacaagaccacgcctcccgtgctggactccgacggctccttcttcctctacagcaagctcaccgtggacaagagcaggtggcagcaggggaacgtcttctcatgctccgtgatgcatgaggctctgcacaaccactacacgcagaagagcctctccctgtctccgggtaaa

SEQ ID NO: 2 - protein, 510 aa, Artificial Sequence
  Mutated M0039
  SIGNAL (1)...(22)
MDFQVQIFSFLLISASVIMSRGVQVQLKESGPGLVAPSQSLSITCTVSGFSLTGYGVNWVRQPPGKGLEWLGMIWGDGSTDYNSALKSRLSITKDNSKSQVFLKMNSLQTDDTARYYCARDGYSNFHYYVMDYWGQGTSVTVSSGGGGSGGGGSGGGGSGGGGSDIVLTQSPASLAVSLGQRATISCRASESVEYYVTSLMQWYQQKPGQPPKLLISAASNVESGVPARFSGSGSGTDFSLNIHPVEEDDIAMYFCQQSRKVPWTFGGGTKLEIKRDQEPKSSDKTHTSPPSPAPELLGGPSVFLFPPKPKDTLMISRTPEVTCVVVDVSHEDPEVKFNWYVDGVEVHNAKTKPREEQYNSTYRVVSVLTVLHQDWLNGKEYKCKVSNKALPAPIEKTISKAKGQPREPQVYTLPPSRDELTKNQVSLTCLVKGFYPSDIAVEWESNGQPENNYKTTPPVLDSDGSFFLYSKLTVDKSRWQQGNVFSCSVMHEALHNHYTQKSLSLSPGK

SEQ ID NO: 3 - DNA, 39 bp, Artificial Sequence
  Oligonucleotide CH1xhonewF
gaaatcaactcgagcgcctccaccaagggcccatcggtc

SEQ ID NO: 4 - DNA, 40 bp, Artificial Sequence
  Oligonucleotide CH1BsiwnewR
tttgggctccgtacgaactttcttgtccaccttggtgttg

SEQ ID NO: 5 - DNA, 94 bp, Artificial Sequence
  Oligonucleotide CH2BsiwnewF
aagaaagttcgtacggagcccaaatcttctgacaaaactcacacatgcccaccgtgcccatccggagcacctgaactcctgggtggaccgtcag

SEQ ID NO: 6 - DNA, 58 bp, Artificial Sequence
  Oligonucleotide CH3NotnewR
gtagacgatggcggccgcgatatgtagtggtatcatttacccggagacagggagaggc

SEQ ID NO: 7 - DNA, 40 bp, Artificial Sequence
  Oligonucleotide 2E12AgeF
ccagataccaccggtcaggtgcagctgaaggagtcaggac

SEQ ID NO: 8 - DNA, 39 bp, Artificial Sequence
  Oligonucleotide 2E12XhoR
tttgggctcgctcgagttgatttccagcttggtgcctcc

SEQ ID NO: 9 - DNA, 39 bp, Artificial Sequence
  Oligonucleotide CkAgeIF
ccagataccaccggtactgtggctgcaccatctgtcttc

SEQ ID NO: 10 - DNA, 40 bp, Artificial Sequence
  Oligonucleotide CkBsiWR
tttgggctccgtacgctctcccctgttgaagctctttgtg

SEQ ID NO: 11 - DNA, 94 bp, Artificial Sequence; identical to SEQ ID NO: 5
  Oligonucleotide CH2BsiwnewF

SEQ ID NO: 12 - DNA, 58 bp, Artificial Sequence; identical to SEQ ID NO: 6
  Oligonucleotide CH3NotnewR

SEQ ID NO: 13 - DNA, 39 bp, Artificial Sequence
  Oligonucleotide CH1xbaF
ccgggtaaatctagagcctccaccaagggcccatcggtc

SEQ ID NO: 14 - DNA, 61 bp, Artificial Sequence
  Oligonucleotide CH1NotR
gtagacgatggcggccgcgatatgtagtggtatcaaactttcttgtccaccttggtgttgc

SEQ ID NO: 15 - DNA, 43 bp, Artificial Sequence
  Oligonucleotide CH2xhoF
ctggaaatcaactcgagcgagcccaaatcttctgacaaaactc

SEQ ID NO: 16 - DNA, 40 bp, Artificial Sequence
  Oligonucleotide CH3xbaR
ggtggaggctctagatttacccggagacagggagaggctc

SEQ ID NO: 17 - DNA, 39 bp, Artificial Sequence
  Oligonucleotide CkXbaF
ccgggtaaatctagaactgtggctgcaccatctgtcttc

SEQ ID NO: 18 - DNA, 61 bp, Artificial Sequence
  Oligonucleotide CkNotR
gtagacgatggcggccgcgatatgtagtggttatcactctcccctgttgaagctctttgtg

SEQ ID NO: 19 - DNA, 46 bp, Artificial Sequence
  Oligonucleotide CH2AgeF
gagttttgtcagaagatttgggctccgaggaaccggtggtatctgg

SEQ ID NO: 20 - DNA, 40 bp, Artificial Sequence
  Oligonucleotide CH3XbaR
gagcctctccctgtctccgggtaaatctagaactgtggct

SEQ ID NO: 21 - DNA, 1827 bp, Artificial Sequence
  X0112
  sig_peptide (1)...(60)
atggaagcaccagcgcagcttctcttcctcctgctactctggctcccagataccaccggtcaggtgcagctgaaggagtcaggacctggcagcgtggcgccctcacagagcctgtccatcacatgcaccgtctcagggttctcattaaccggctatggtgtaaactgggttcgccagcctccaggaaagggtctggagtggctgggaatgatatggggtgatggaagcacagactataattcagctctcaaatccagactatcgatcaccaaggacaactccaagagccaagttttcttaaaaatgaacagtctgcaaactgatgacacagccagatactactgtgctcgggatggttatagtaactttcattactatgttatggactactggggtcaaggaacctcagtcaccgtctcctctgggggtggaggctctggtggcggtggatccggcggaggtgggtcgggtggcggcggatctgacattgtgctcacccaatctccagcttctttggctgtgtctctaggtcagagagccaccatctcctgcagagccagtgaaagtgttgaatattatgtcacaagtttaatgcagtggtaccaacagaaaccaggacagccacccaaactcctcatctctgctgctagcaacgtagaatctggggtccctgccaggtttagtggcagtgggtctgggacagactttagcctcaacatccatcctgtggaggaggatgatattgcaatgtatttctgtcagcaaagtaggaaggttccatggacgttcggtggaggcaccaagctggaaatcaagtcctcgagcgcctccaccaagggcccatcggtcttccccctggcaccctcctccaagagcacctctgggggcacagcggccctgggctgcctggtcaaggactacttccccgagccggtgacggtgtcgtggaactcaggcgccctgaccagcggcgtgcacaccttcccggctgtcctacagtcctcaggactctactccctcagcagcgtggtgaccgtgccctccagcagcttgggcacccagacctacatctgcaacgtgaatcacaagcccagcaacaccaaggtggacaagaaagttcgtacggagcccaaatcttctgacaaaactcacacatgcccaccgtgcccatccggagcacctgaactcctgggtggaccgtcagtcttcctcttccccccaaaacccaaggacaccctcatgatctcccggacccctgaggtcacatgcgtggtggtggacgtgagccacgaagaccctgaggtcaagttcaactggtacgtggacggcgtggaggtgcataatgccaagacaaagccgcgggaggagcagtacaacagcacgtaccgtgtggtcagcgtcctcaccgtcctgcaccaggactggctgaatggcaaggagtacaagtgcaaggtctccaacaaagccctcccagcccccatcgagaaaaccatctccaaagccaaagggcagccccgagaaccacaggtgtacaccctgcccccatcccgggatgagctgaccaagaaccaggtcagcctgacctgcctggtcaaaggcttctatccaagcgacatcgccgtggagtgggagagcaatgggcagccggagaacaactacaagaccacgcctcccgtgctggactccgacggctccttcttcctctacagcaagctcaccgtggacaagagcaggtggcagcaggggaacgtcttctcatgctccgtgatgcatgaggctctgcacaaccactacacgcagaagagcctctccctgtctccgggtaaa

SEQ ID NO: 22 - protein, 609 aa, Artificial Sequence
  X0112
  SIGNAL (1)...(20)
MEAPAQLLFLLLLWLPDTTGQVQLKESGPGSVAPSQSLSITCTVSGFSLTGYGVNWVRQPPGKGLEWLGMIWGDGSTDYNSALKSRLSITKDNSKSQVFLKMNSLQTDDTARYYCARDGYSNFHYYVMDYWGQGTSVTVSSGGGGSGGGGSGGGGSGGGGSDIVLTQSPASLAVSLGQRATISCRASESVEYYVTSLMQWYQQKPGQPPKLLISAASNVESGVPARFSGSGSGTDFSLNIHPVEEDDIAMYFCQQSRKVPWTFGGGTKLEIKSSSASTKGPSVFPLAPSSKSTSGGTAALGCLVKDYFPEPVTVSWNSGALTSGVHTFPAVLQSSGLYSLSSVVTVPSSSLGTQTYICNVNHKPSNTKVDKKVRTEPKSSDKTHTCPPCPSGAPELLGGPSVFLFPPKPKDTLMISRTPEVTCVVVDVSHEDPEVKFNWYVDGVEVHNAKTKPREEQYNSTYRVVSVLTVLHQDWLNGKEYKCKVSNKALPAPIEKTISKAKGQPREPQVYTLPPSRDELTKNQVSLTCLVKGFYPSDIAVEWESNGQPENNYKTTPPVLDSDGSFFLYSKLTVDKSRWQQGNVFSCSVMHEALHNHYTQKSLSLSPGK

SEQ ID NO: 23 - DNA, 1083 bp, Artificial Sequence
  X0113
  sig_peptide (1)...(60)
atggaagcaccagcgcagcttctcttcctcctgctactctggctcccagataccaccggtactgtggctgcaccatctgtcttcatcttcccgccatctgatgagcagttgaaatctggaactgcctctgttgtgtgcctgctgaataacttctatcccagagaggccaaagtacagtggaaggtggataacgccctccaatcgggtaactcccaggagagtgtcacagagcaggacagcaaggacagcacctacagcctcagcagcaccctgacgctgagcaaagcagactacgagaaacacaaagtctacgcctgcgaagtcacccatcagggcctgagctcgcccgtcacaaagagcttcaacaggggagagcgtacggagcccaaatcttctgacaaaactcacacatgcccaccgtgcccatccggagcacctgaactcctgggtggaccgtcagtcttcctcttccccccaaaacccaaggacaccctcatgatctcccggacccctgaggtcacatgcgtggtggtggacgtgagccacgaagaccctgaggtcaagttcaactggtacgtggacggcgtggaggtgcataatgccaagacaaagccgcgggaggagcagtacaacagcacgtaccgtgtggtcagcgtcctcaccgtcctgcaccaggactggctgaatggcaaggagtacaagtgcaaggtctccaacaaagccctcccagcccccatcgagaaaaccatctccaaagccaaagggcagccccgagaaccacaggtgtacaccctgcccccatcccgggatgagctgaccaagaaccaggtcagcctgacctgcctggtcaaaggcttctatccaagcgacatcgccgtggagtgggagagcaatgggcagccggagaacaactacaagaccacgcctcccgtgctggactccgacggctccttcttcctctacagcaagctcaccgtggacaagagcaggtggcagcaggggaacgtcttctcatgctccgtgatgcatgaggctctgcacaaccactacacgcagaagagcctctccctgtctccgggtaaa

SEQ ID NO: 24 - protein, 361 aa, Artificial Sequence
  X0113
  SIGNAL (1)...(20)
MEAPAQLLFLLLLWLPDTTGTVAAPSVFIFPPSDEQLKSGTASVVCLLNNFYPREAKVQWKVDNALQSGNSQESVTEQDSKDSTYSLSSTLTLSKADYEKHKVYACEVTHQGLSSPVTKSFNRGERTEPKSSDKTHTCPPCPSGAPELLGGPSVFLFPPKPKDTLMISRTPEVTCVVVDVSHEDPEVKFNWYVDGVEVHNAKTKPREEQYNSTYRVVSVLTVLHQDWLNGKEYKCKVSNKALPAPIEKTISKAKGQPREPQVYTLPPSRDELTKNQVSLTCLVKGFYPSDIAVEWESNGQPENNYKTTPPVLDSDGSFFLYSKLTVDKSRWQQGNVFSCSVMHEALHNHYTQKSLSLSPGK

SEQ ID NO: 25 - DNA, 1827 bp, Artificial Sequence
  X0115
  sig_peptide (1)...(60)
atggaagcaccagcgcagcttctcttcctcctgctactctggctcccagataccaccggtcaggtgcagctgaaggagtcaggacctggcagcgtggcgccctcacagagcctgtccatcacatgcaccgtctcagggttctcattaaccggctatggtgtaaactgggttcgccagcctccaggaaagggtctggagtggctgggaatgatatggggtgatggaagcacagactataattcagctctcaaatccagactatcgatcaccaaggacaactccaagagccaagttttcttaaaaatgaacagtctgcaaactgatgacacagccagatactactgtgctcgggatggttatagtaactttcattactatgttatggactactggggtcaaggaacctcagtcaccgtctcctctgggggtggaggctctggtggcggtggatccggcggaggtgggtcgggtggcggcggatctgacattgtgctcacccaatctccagcttctttggctgtgtctctaggtcagagagccaccatctcctgcagagccagtgaaagtgttgaatattatgtcacaagtttaatgcagtggtaccaacagaaaccaggacagccacccaaactcctcatctctgctgctagcaacgtagaatctggggtccctgccaggtttagtggcagtgggtctgggacagactttagcctcaacatccatcctgtggaggaggatgatattgcaatgtatttctgtcagcaaagtaggaaggttccatggacgttcggtggaggcaccaagctggaaatcaagtcctcgagcgagcccaaatcttctgacaaaactcacacatgcccaccgtgcccatccggagcacctgaactcctgggtggaccgtcagtcttcctcttccccccaaaacccaaggacaccctcatgatctcccggacccctgaggtcacatgcgtggtggtggacgtgagccacgaagaccctgaggtcaagttcaactggtacgtggacggcgtggaggtgcataatgccaagacaaagccgcgggaggagcagtacaacagcacgtaccgtgtggtcagcgtcctcaccgtcctgcaccaggactggctgaatggcaaggagtacaagtgcaaggtctccaacaaagccctcccagcccccatcgagaaaaccatctccaaagccaaagggcagccccgagaaccacaggtgtacaccctgcccccatcccgggatgagctgaccaagaaccaggtcagcctgacctgcctggtcaaaggcttctatccaagcgacatcgccgtggagtgggagagcaatgggcagccggagaacaactacaagaccacgcctcccgtgctggactccgacggctccttcttcctctacagcaagctcaccgtggacaagagcaggtggcagcaggggaacgtcttctcatgctccgtgatgcatgaggctctgcacaaccactacacgcagaagagcctctccctgtctccgggtaaatctagagcctccaccaagggcccatcggtcttccccctggcaccctcctccaagagcacctctgggggcacagcggccctgggctgcctggtcaaggactacttccccgagccggtgacggtgtcgtggaactcaggcgccctgaccagcggcgtgcacaccttcccggctgtcctacagtcctcaggactctactccctcagcagcgtggtgaccgtgccctccagcagcttgggcacccagacctacatctgcaacgtgaatcacaagcccagcaacaccaaggtggacaagaaagtt

SEQ ID NO: 26 - protein, 609 aa, Artificial Sequence
  X0115
  SIGNAL (1)...(20)
MEAPAQLLFLLLLWLPDTTGQVQLKESGPGSVAPSQSLSITCTVSGFSLTGYGVNWVRQPPGKGLEWLGMIWGDGSTDYNSALKSRLSITKDNSKSQVFLKMNSLQTDDTARYYCARDGYSNFHYYVMDYWGQGTSVTVSSGGGGSGGGGSGGGGSGGGGSDIVLTQSPASLAVSLGQRATISCRASESVEYYVTSLMQWYQQKPGQPPKLLISAASNVESGVPARFSGSGSGTDFSLNIHPVEEDDIAMYFCQQSRKVPWTFGGGTKLEIKSSSEPKSSDKTHTCPPCPSGAPELLGGPSVFLFPPKPKDTLMISRTPEVTCVVVDVSHEDPEVKFNWYVDGVEVHNAKTKPREEQYNSTYRVVSVLTVLHQDWLNGKEYKCKVSNKALPAPIEKTISKAKGQPREPQVYTLPPSRDELTKNQVSLTCLVKGFYPSDIAVEWESNGQPENNYKTTPPVLDSDGSFFLYSKLTVDKSRWQQGNVFSCSVMHEALHNHYTQKSLSLSPGKSRASTKGPSVFPLAPSSKSTSGGTAALGCLVKDYFPEPVTVSWNSGALTSGVHTFPAVLQSSGLYSLSSVVTVPSSSLGTQTYICNVNHKPSNTKVDKKV

SEQ ID NO: 27 - DNA, 1089 bp, Artificial Sequence
  X0114
  sig_peptide (1)...(60)
atggaagcaccagcgcagcttctcttcctcctgctactctggctcccagataccaccggttcctcggagcccaaatcttctgacaaaactcacacatgcccaccgtgcccatccggagcacctgaactcctgggtggaccgtcagtcttcctcttccccccaaaacccaaggacaccctcatgatctcccggacccctgaggtcacatgcgtggtggtggacgtgagccacgaagaccctgaggtcaagttcaactggtacgtggacggcgtggaggtgcataatgccaagacaaagccgcgggaggagcagtacaacagcacgtaccgtgtggtcagcgtcctcaccgtcctgcaccaggactggctgaatggcaaggagtacaagtgcaaggtctccaacaaagccctcccagcccccatcgagaaaaccatctccaaagccaaagggcagccccgagaaccacaggtgtacaccctgcccccatcccgggatgagctgaccaagaaccaggtcagcctgacctgcctggtcaaaggcttctatccaagcgacatcgccgtggagtgggagagcaatgggcagccggagaacaactacaagaccacgcctcccgtgctggactccgacggctccttcttcctctacagcaagctcaccgtggacaagagcaggtggcagcaggggaacgtcttctcatgctccgtgatgcatgaggctctgcacaaccactacacgcagaagagcctctccctgtctccgggtaaatctagaactgtggctgcaccatctgtcttcatcttcccgccatctgatgagcagttgaaatctggaactgcctctgttgtgtgcctgctgaataacttctatcccagagaggccaaagtacagtggaaggtggataacgccctccaatcgggtaactcccaggagagtgtcacagagcaggacagcaaggacagcacctacagcctcagcagcaccctgacgctgagcaaagcagactacgagaaacacaaagtctacgcctgcgaagtcacccatcagggcctgagctcgcccgtcacaaagagcttcaacaggggagag

SEQ ID NO: 28 - protein, 363 aa, Artificial Sequence
  X0114
  SIGNAL (1)...(20)
MEAPAQLLFLLLLWLPDTTGSSEPKSSDKTHTCPPCPSGAPELLGGPSVFLFPPKPKDTLMISRTPEVTCVVVDVSHEDPEVKFNWYVDGVEVHNAKTKPREEQYNSTYRVVSVLTVLHQDWLNGKEYKCKVSNKALPAPIEKTISKAKGQPREPQVYTLPPSRDELTKNQVSLTCLVKGFYPSDIAVEWESNGQPENNYKTTPPVLDSDGSFFLYSKLTVDKSRWQQGNVFSCSVMHEALHNHYTQKSLSLSPGKSRTVAAPSVFIFPPSDEQLKSGTASVVCLLNNFYPREAKVQWKVDNALQSGNSQESVTEQDSKDSTYSLSSTLTLSKADYEKHKVYACEVTHQGLSSPVTKSFNRGE

SEQ ID NO: 29 - DNA, 1827 bp, Artificial Sequence
  X0116
  sig_peptide (1)...(60)
atggaagcaccagcgcagcttctcttcctcctgctactctggctcccagataccaccggtcaggtgcagctgaaggagtcaggacctggcagcgtggcgccctcacagagcctgtccatcacatgcaccgtctcagggttctcattaaccggctatggtgtaaactgggttcgccagcctccaggaaagggtctggagtggctgggaatgatatggggtgatggaagcacagactataattcagctctcaaatccagactatcgatcaccaaggacaactccaagagccaagttttcttaaaaatgaacagtctgcaaactgatgacacagccagatactactgtgctcgggatggttatagtaactttcattactatgttatggactactggggtcaaggaacctcagtcaccgtctcctctgggggtggaggctctggtggcggtggatccggcggaggtgggtcgggtggcggcggatctgacattgtgctcacccaatctccagcttctttggctgtgtctctaggtcagagagccaccatctcctgcagagccagtgaaagtgttgaatattatgtcacaagtttaatgcagtggtaccaacagaaaccaggacagccacccaaactcctcatctctgctgctagcaacgtagaatctggggtccctgccaggtttagtggcagtgggtctgggacagactttagcctcaacatccatcctgtggaggaggatgatattgcaatgtatttctgtcagcaaagtaggaaggttccatggacgttcggtggaggcaccaagctggaaatcaagtcctcgagcgcctccaccaagggcccatcggtcttccccctggcaccctcctccaagagcacctctgggggcacagcggccctgggctgcctggtcaaggactacttccccgagccggtgacggtgtcgtggaactcaggcgccctgaccagcggcgtgcacaccttcccggctgtcctacagtcctcaggactctactccctcagcagcgtggtgaccgtgccctccagcagcttgggcacccagacctacatctgcaacgtgaatcacaagcccagcaacaccaaggtggacaagaaagttcgtacggagcccaaatcttctgacaaaactcacacatgcccaccgtgcccatccggagcacctgaactcctgggtggaccgtcagtcttcctcttccccccaaaacccaaggacaccctcatgatctcccggacccctgaggtcacatgcgtggtggtggacgtgagccacgaagaccctgaggtcaagttcaactggtacgtggacggcgtggaggtgcataatgccaagacaaagccgcgggaggagcagtacaacagcacgtaccgtgtggtcagcgtcctcaccgtcctgcaccaggactggctgaatggcaaggagtacaagtgcaaggtctccaacaaagccctcccagcccccatcgagaaaaccatctccaaagccaaagggcagccccgagaaccacaggtgtacaccctgcccccatcccgggatgagctgaccaagaaccaggtcagcctgacctgcctggtcaaaggcttctatccaagcgacatcgccgtggagtgggagagcaatgggcagccggagaacaactacaagaccacgcctcccgtgctggactccgacggctccttcgcactcgccagcaagctcaccgtggacaagagcaggtggcagcaggggaacgtcttctcatgctccgtgatgcatgaggctctgcacaaccactacacgcagaagagcctctccctgtctccgggtaaa

SEQ ID NO: 30 - protein, 609 aa, Artificial Sequence
  X0116
  SIGNAL (1)...(20)
MEAPAQLLFLLLLWLPDTTGQVQLKESGPGSVAPSQSLSITCTVSGFSLTGYGVNWVRQPPGKGLEWLGMIWGDGSTDYNSALKSRLSITKDNSKSQVFLKMNSLQTDDTARYYCARDGYSNFHYYVMDYWGQGTSVTVSSGGGGSGGGGSGGGGSGGGGSDIVLTQSPASLAVSLGQRATISCRASESVEYYVTSLMQWYQQKPGQPPKLLISAASNVESGVPARFSGSGSGTDFSLNIHPVEEDDIAMYFCQQSRKVPWTFGGGTKLEIKSSSASTKGPSVFPLAPSSKSTSGGTAALGCLVKDYFPEPVTVSWNSGALTSGVHTFPAVLQSSGLYSLSSVVTVPSSSLGTQTYICNVNHKPSNTKVDKKVRTEPKSSDKTHTCPPCPSGAPELLGGPSVFLFPPKPKDTLMISRTPEVTCVVVDVSHEDPEVKFNWYVDGVEVHNAKTKPREEQYNSTYRVVSVLTVLHQDWLNGKEYKCKVSNKALPAPIEKTISKAKGQPREPQVYTLPPSRDELTKNQVSLTCLVKGFYPSDIAVEWESNGQPENNYKTTPPVLDSDGSFALASKLTVDKSRWQQGNVFSCSVMHEALHNHYTQKSLSLSPGK

SEQ ID NO: 31 - DNA, 1083 bp, Artificial Sequence
  X0117
  sig_peptide (1)...(60)
atggaagcaccagcgcagcttctcttcctcctgctactctggctcccagataccaccggtactgtggctgcaccatctgtcttcatcttcccgccatctgatgagcagttgaaatctggaactgcctctgttgtgtgcctgctgaataacttctatcccagagaggccaaagtacagtggaaggtggataacgccctccaatcgggtaactcccaggagagtgtcacagagcaggacagcaaggacagcacctacagcctcagcagcaccctgacgctgagcaaagcagactacgagaaacacaaagtctacgcctgcgaagtcacccatcagggcctgagctcgcccgtcacaaagagcttcaacaggggagagcgtacggagcccaaatcttctgacaaaactcacacatgcccaccgtgcccatccggagcacctgaactcctgggtggaccgtcagtcttcctcttccccccaaaacccaaggacaccctcatgatctcccggacccctgaggtcacatgcgtggtggtggacgtgagccacgaagaccctgaggtcaagttcaactggtacgtggacggcgtggaggtgcataatgccaagacaaagccgcgggaggagcagtacaacagcacgtaccgtgtggtcagcgtcctcaccgtcctgcaccaggactggctgaatggcaaggagtacaagtgcaaggtctccaacaaagccctcccagcccccatcgagaaaaccatctccaaagccaaagggcagccccgagaaccacaggtgtacaccctgcccccatcccgggatgagctgaccaagaaccaggtcagcctgacctgcctggtcaaaggcttctatccaagcgacatcgccgtggagtgggagagcaatgggcagccggagaacaactacaagaccacgcctcccgtgctggactccgacggctccttcgcactcgccagcaagctcaccgtggacaagagcaggtggcagcaggggaacgtcttctcatgctccgtgatgcatgaggctctgcacaaccactacacgcagaagagcctctccctgtctccgggtaaa

SEQ ID NO: 32 - protein, 361 aa, Artificial Sequence
  X0117
  SIGNAL (1)...(20)
MEAPAQLLFLLLLWLPDTTGTVAAPSVFIFPPSDEQLKSGTASVVCLLNNFYPREAKVQWKVDNALQSGNSQESVTEQDSKDSTYSLSSTLTLSKADYEKHKVYACEVTHQGLSSPVTKSFNRGERTEPKSSDKTHTCPPCPSGAPELLGGPSVFLFPPKPKDTLMISRTPEVTCVVVDVSHEDPEVKFNWYVDGVEVHNAKTKPREEQYNSTYRVVSVLTVLHQDWLNGKEYKCKVSNKALPAPIEKTISKAKGQPREPQVYTLPPSRDELTKNQVSLTCLVKGFYPSDIAVEWESNGQPENNYKTTPPVLDSDGSFALASKLTVDKSRWQQGNVFSCSVMHEALHNHYTQKSLSLSPGK

SEQ ID NO: 33 - DNA, 1089 bp, Artificial Sequence
  X0118
  sig_peptide (1)...(60)
atggaagcaccagcgcagcttctcttcctcctgctactctggctcccagataccaccggttcctcggagcccaaatcttctgacaaaactcacacatgcccaccgtgcccatccggagcacctgaactcctgggtggaccgtcagtcttcctcttccccccaaaacccaaggacaccctcatgatctcccggacccctgaggtcacatgcgtggtggtggacgtgagccacgaagaccctgaggtcaagttcaactggtacgtggacggcgtggaggtgcataatgccaagacaaagccgcgggaggagcagtacaacagcacgtaccgtgtggtcagcgtcctcaccgtcctgcaccaggactggctgaatggcaaggagtacaagtgcaaggtctccaacaaagccctcccagcccccatcgagaaaaccatctccaaagccaaagggcagccccgagaaccacaggtgtacaccctgcccccatcccgggatgagctgaccaagaaccaggtcagcctgacctgcctggtcaaaggcttctatccaagcgacatcgccgtggagtgggagagcaatgggcagccggagaacaactacaagaccacgcctcccgtgctggactccgacggctccttcgcactcgccagcaagctcaccgtggacaagagcaggtggcagcaggggaacgtcttctcatgctccgtgatgcatgaggctctgcacaaccactacacgcagaagagcctctccctgtctccgggtaaatctagaactgtggctgcaccatctgtcttcatcttcccgccatctgatgagcagttgaaatctggaactgcctctgttgtgtgcctgctgaataacttctatcccagagaggccaaagtacagtggaaggtggataacgccctccaatcgggtaactcccaggagagtgtcacagagcaggacagcaaggacagcacctacagcctcagcagcaccctgacgctgagcaaagcagactacgagaaacacaaagtctacgcctgcgaagtcacccatcagggcctgagctcgcccgtcacaaagagcttcaacaggggagag

SEQ ID NO: 34 - protein, 363 aa, Artificial Sequence
  X0118
  SIGNAL (1)...(20)
MEAPAQLLFLLLLWLPDTTGSSEPKSSDKTHTCPPCPSGAPELLGGPSVFLFPPKPKDTLMISRTPEVTCVVVDVSHEDPEVKFNWYVDGVEVHNAKTKPREEQYNSTYRVVSVLTVLHQDWLNGKEYKCKVSNKALPAPIEKTISKAKGQPREPQVYTLPPSRDELTKNQVSLTCLVKGFYPSDIAVEWESNGQPENNYKTTPPVLDSDGSFALASKLTVDKSRWQQGNVFSCSVMHEALHNHYTQKSLSLSPGKSRTVAAPSVFIFPPSDEQLKSGTASVVCLLNNFYPREAKVQWKVDNALQSGNSQESVTEQDSKDSTYSLSSTLTLSKADYEKHKVYACEVTHQGLSSPVTKSFNRGE

SEQ ID NO: 35 - DNA, 1827 bp, Artificial Sequence
  X0119
  sig_peptide (1)...(60)
atggaagcaccagcgcagcttctcttcctcctgctactctggctcccagataccaccggtcaggtgcagctgaaggagtcaggacctggcagcgtggcgccctcacagagcctgtccatcacatgcaccgtctcagggttctcattaaccggctatggtgtaaactgggttcgccagcctccaggaaagggtctggagtggctgggaatgatatggggtgatggaagcacagactataattcagctctcaaatccagactatcgatcaccaaggacaactccaagagccaagttttcttaaaaatgaacagtctgcaaactgatgacacagccagatactactgtgctcgggatggttatagtaactttcattactatgttatggactactggggtcaaggaacctcagtcaccgtctcctctgggggtggaggctctggtggcggtggatccggcggaggtgggtcgggtggcggcggatctgacattgtgctcacccaatctccagcttctttggctgtgtctctaggtcagagagccaccatctcctgcagagccagtgaaagtgttgaatattatgtcacaagtttaatgcagtggtaccaacagaaaccaggacagccacccaaactcctcatctctgctgctagcaacgtagaatctggggtccctgccaggtttagtggcagtgggtctgggacagactttagcctcaacatccatcctgtggaggaggatgatattgcaatgtatttctgtcagcaaagtaggaaggttccatggacgttcggtggaggcaccaagctggaaatcaagtcctcgagcgagcccaaatcttctgacaaaactcacacatgcccaccgtgcccatccggagcacctgaactcctgggtggaccgtcagtcttcctcttccccccaaaacccaaggacaccctcatgatctcccggacccctgaggtcacatgcgtggtggtggacgtgagccacgaagaccctgaggtcaagttcaactggtacgtggacggcgtggaggtgcataatgccaagacaaagccgcgggaggagcagtacaacagcacgtaccgtgtggtcagcgtcctcaccgtcctgcaccaggactggctgaatggcaaggagtacaagtgcaaggtctccaacaaagccctcccagcccccatcgagaaaaccatctccaaagccaaagggcagccccgagaaccacaggtgtacaccctgcccccatcccgggatgagctgaccaagaaccaggtcagcctgacctgcctggtcaaaggcttctatccaagcgacatcgccgtggagtgggagagcaatgggcagccggagaacaactacaagaccacgcctcccgtgctggactccgacggctccttcgcactcgccagcaagctcaccgtggacaagagcaggtggcagcaggggaacgtcttctcatgctccgtgatgcatgaggctctgcacaaccactacacgcagaagagcctctccctgtctccgggtaaatctagagcctccaccaagggcccatcggtcttccccctggcaccctcctccaagagcacctctgggggcacagcggccctgggctgcctggtcaaggactacttccccgagccggtgacggtgtcgtggaactcaggcgccctgaccagcggcgtgcacaccttcccggctgtcctacagtcctcaggactctactccctcagcagcgtggtgaccgtgccctccagcagcttgggcacccagacctacatctgcaacgtgaatcacaagcccagcaacaccaaggtggacaagaaagtt

SEQ ID NO: 36 - protein, 609 aa, Artificial Sequence
  X0119
  SIGNAL (1)...(20)
MEAPAQLLFLLLLWLPDTTGQVQLKESGPGSVAPSQSLSITCTVSGFSLTGYGVNWVRQPPGKGLEWLGMIWGDGSTDYNSALKSRLSITKDNSKSQVFLKMNSLQTDDTARYYCARDGYSNFHYYVMDYWGQGTSVTVSSGGGGSGGGGSGGGGSGGGGSDIVLTQSPASLAVSLGQRATISCRASESVEYYVTSLMQWYQQKPGQPPKLLISAASNVESGVPARFSGSGSGTDFSLNIHPVEEDDIAMYFCQQSRKVPWTFGGGTKLEIKSSSEPKSSDKTHTCPPCPSGAPELLGGPSVFLFPPKPKDTLMISRTPEVTCVVVDVSHEDPEVKFNWYVDGVEVHNAKTKPREEQYNSTYRVVSVLTVLHQDWLNGKEYKCKVSNKALPAPIEKTISKAKGQPREPQVYTLPPSRDELTKNQVSLTCLVKGFYPSDIAVEWESNGQPENNYKTTPPVLDSDGSFALASKLTVDKSRWQQGNVFSCSVMHEALHNHYTQKSLSLSPGKSRASTKGPSVFPLAPSSKSTSGGTAALGCLVKDYFPEPVTVSWNSGALTSGVHTFPAVLQSSGLYSLSSVVTVPSSSLGTQTYICNVNHKPSNTKVDKKV

SEQ ID NO: 37 - DNA, 2127 bp, Artificial Sequence
  X0120
  sig_peptide (1)...(60)
atggaagcaccagcgcagcttctcttcctcctgctactctggctcccagataccaccggtcaggtgcagctgaaggagtcaggacctggcagcgtggcgccctcacagagcctgtccatcacatgcaccgtctcagggttctcattaaccggctatggtgtaaactgggttcgccagcctccaggaaagggtctggagtggctgggaatgatatggggtgatggaagcacagactataattcagctctcaaatccagactatcgatcaccaaggacaactccaagagccaagttttcttaaaaatgaacagtctgcaaactgatgacacagccagatactactgtgctcgggatggttatagtaactttcattactatgttatggactactggggtcaaggaacctcagtcaccgtctcctctgggggtggaggctctggtggcggtggatccggcggaggtgggtcgggtggcggcggatctgacattgtgctcacccaatctccagcttctttggctgtgtctctaggtcagagagccaccatctcctgcagagccagtgaaagtgttgaatattatgtcacaagtttaatgcagtggtaccaacagaaaccaggacagccacccaaactcctcatctctgctgctagcaacgtagaatctggggtccctgccaggtttagtggcagtgggtctgggacagactttagcctcaacatccatcctgtggaggaggatgatattgcaatgtatttctgtcagcaaagtaggaaggttccatggacgttcggtggaggcaccaagctggaaatcaagtcctcgagcgcctccaccaagggcccatcggtcttccccctggcaccctcctccaagagcacctctgggggcacagcggccctgggctgcctggtcaaggactacttccccgagccggtgacggtgtcgtggaactcaggcgccctgaccagcggcgtgcacaccttcccggctgtcctacagtcctcaggactctactccctcagcagcgtggtgaccgtgccctccagcagcttgggcacccagacctacatctgcaacgtgaatcacaagcccagcaacaccaaggtggacaagaaagttcgtacggagcccaaatcttctgacaaaactcacacatgcccaccgtgcccatccggagcacctgaactcctgggtggaccgtcagtcttcctcttccccccaaaacccaaggacaccctcatgatctcccggacccctgaggtcacatgcgtggtggtggacgtgagccacgaagaccctgaggtcaagttcaactggtacgtggacggcgtggaggtgcataatgccaagacaaagccgcgggaggagcagtacaacagcacgtaccgtgtggtcagcgtcctcaccgtcctgcaccaggactggctgaatggcaaggagtacaagtgcaaggtctccaacaaagccctcccagcccccatcgagaaaaccatctccaaagccaaagggcagccccgagaaccacaggtgtacaccctgcccccatcccgggatgagctgaccaagaaccaggtcagcctgacctgcctggtcaaaggcttctatccaagcgacatcgccgtggagtgggagagcaatgggcagccggagaacaactacaagaccacgcctcccgtgctggactccgacggctccttcttcctctacagcaagctcaccgtggacaagagcaggtggcagcaggggaacgtcttctcatgctccgtgatgcatgaggctctgcacaaccactacacgcagaagagcctctccctgtctccgggtaaatctagagcctccaccaagggcccatcggtcttccccctggcaccctcctccaagagcacctctgggggcacagcggccctgggctgcctggtcaaggactacttccccgagccggtgacggtgtcgtggaactcaggcgccctgaccagcggcgtgcacaccttcccggctgtcctacagtcctcaggactctactccctcagcagcgtggtgaccgtgccctccagcagcttgggcacccagacctacatctgcaacgtgaatcacaagcccagcaacaccaaggtggacaagaaagtt

SEQ ID NO: 38 - protein, 709 aa, Artificial Sequence
  X0120
  SIGNAL (1)...(20)
MEAPAQLLFLLLLWLPDTTGQVQLKESGPGSVAPSQSLSITCTVSGFSLTGYGVNWVRQPPGKGLEWLGMIWGDGSTDYNSALKSRLSITKDNSKSQVFLKMNSLQTDDTARYYCARDGYSNFHYYVMDYWGQGTSVTVSSGGGGSGGGGSGGGGSGGGGSDIVLTQSPASLAVSLGQRATISCRASESVEYYVTSLMQWYQQKPGQPPKLLISAASNVESGVPARFSGSGSGTDFSLNIHPVEEDDIAMYFCQQSRKVPWTFGGGTKLEIKSSSASTKGPSVFPLAPSSKSTSGGTAALGCLVKDYFPEPVTVSWNSGALTSGVHTFPAVLQSSGLYSLSSVVTVPSSSLGTQTYICNVNHKPSNTKVDKKVRTEPKSSDKTHTCPPCPSGAPELLGGPSVFLFPPKPKDTLMISRTPEVTCVVVDVSHEDPEVKFNWYVDGVEVHNAKTKPREEQYNSTYRVVSVLTVLHQDWLNGKEYKCKVSNKALPAPIEKTISKAKGQPREPQVYTLPPSRDELTKNQVSLTCLVKGFYPSDIAVEWESNGQPENNYKTTPPVLDSDGSFFLYSKLTVDKSRWQQGNVFSCSVMHEALHNHYTQKSLSLSPGKSRASTKGPSVFPLAPSSKSTSGGTAALGCLVKDYFPEPVTVSWNSGALTSGVHTFPAVLQSSGLYSLSSVVTVPSSSLGTQTYICNVNHKPSNTKVDKKV

SEQ ID NO: 39 - DNA, 1404 bp, Artificial Sequence
  X0121
  sig_peptide (1)...(60)
atggaagcaccagcgcagcttctcttcctcctgctactctggctcccagataccaccggtactgtggctgcaccatctgtcttcatcttcccgccatctgatgagcagttgaaatctggaactgcctctgttgtgtgcctgctgaataacttctatcccagagaggccaaagtacagtggaaggtggataacgccctccaatcgggtaactcccaggagagtgtcacagagcaggacagcaaggacagcacctacagcctcagcagcaccctgacgctgagcaaagcagactacgagaaacacaaagtctacgcctgcgaagtcacccatcagggcctgagctcgcccgtcacaaagagcttcaacaggggagagcgtacggagcccaaatcttctgacaaaactcacacatgcccaccgtgcccatccggagcacctgaactcctgggtggaccgtcagtcttcctcttccccccaaaacccaaggacaccctcatgatctcccggacccctgaggtcacatgcgtggtggtggacgtgagccacgaagaccctgaggtcaagttcaactggtacgtggacggcgtggaggtgcataatgccaagacaaagccgcgggaggagcagtacaacagcacgtaccgtgtggtcagcgtcctcaccgtcctgcaccaggactggctgaatggcaaggagtacaagtgcaaggtctccaacaaagccctcccagcccccatcgagaaaaccatctccaaagccaaagggcagccccgagaaccacaggtgtacaccctgcccccatcccgggatgagctgaccaagaaccaggtcagcctgacctgcctggtcaaaggcttctatccaagcgacatcgccgtggagtgggagagcaatgggcagccggagaacaactacaagaccacgcctcccgtgctggactccgacggctccttcttcctctacagcaagctcaccgtggacaagagcaggtggcagcaggggaacgtcttctcatgctccgtgatgcatgaggctctgcacaaccactacacgcagaagagcctctccctgtctccgggtaaatctagaactgtggctgcaccatctgtcttcatcttcccgccatctgatgagcagttgaaatctggaactgcctctgttgtgtgcctgctgaataacttctatcccagagaggccaaagtacagtggaaggtggataacgccctccaatcgggtaactcccaggagagtgtcacagagcaggacagcaaggacagcacctacagcctcagcagcaccctgacgctgagcaaagcagactacgagaaacacaaagtctacgcctgcgaagtcacccatcagggcctgagctcgcccgtcacaaagagcttcaacaggggagag

SEQ ID NO: 40 - protein, 468 aa, Artificial Sequence
  X0121
  SIGNAL (1)...(20)
MEAPAQLLFLLLLWLPDTTGTVAAPSVFIFPPSDEQLKSGTASVVCLLNNFYPREAKVQWKVDNALQSGNSQESVTEQDSKDSTYSLSSTLTLSKADYEKHKVYACEVTHQGLSSPVTKSFNRGERTEPKSSDKTHTCPPCPSGAPELLGGPSVFLFPPKPKDTLMISRTPEVTCVVVDVSHEDPEVKFNWYVDGVEVHNAKTKPREEQYNSTYRVVSVLTVLHQDWLNGKEYKCKVSNKALPAPIEKTISKAKGQPREPQVYTLPPSRDELTKNQVSLTCLVKGFYPSDIAVEWESNGQPENNYKTTPPVLDSDGSFFLYSKLTVDKSRWQQGNVFSCSVMHEALHNHYTQKSLSLSPGKSRTVAAPSVFIFPPSDEQLKSGTASVVCLLNNFYPREAKVQWKVDNALQSGNSQESVTEQDSKDSTYSLSSTLTLSKADYEKHKVYACEVTHQGLSSPVTKSFNRGE

SEQ ID NO: 41 - DNA, 1404 bp, Artificial Sequence; identical to SEQ ID NO: 39
  X0122
  sig_peptide (1)...(60)

SEQ ID NO: 42 - protein, 709 aa, Artificial Sequence
  X0122
  SIGNAL (1)...(20)
MEAPAQLLFLLLLWLPDTTGQVQLKESGPGSVAPSQSLSITCTVSGFSLTGYGVNWVRQPPGKGLEWLGMIWGDGSTDYNSALKSRLSITKDNSKSQVFLKMNSLQTDDTARYYCARDGYSNFHYYVMDYWGQGTSVTVSSGGGGSGGGGSGGGGSGGGGSDIVLTQSPASLAVSLGQRATISCRASESVEYYVTSLMQWYQQKPGQPPKLLISAASNVESGVPARFSGSGSGTDFSLNIHPVEEDDIAMYFCQQSRKVPWTFGGGTKLEIKSSSASTKGPSVFPLAPSSKSTSGGTAALGCLVKDYFPEPVTVSWNSGALTSGVHTFPAVLQSSGLYSLSSVVTVPSSSLGTQTYICNVNHKPSNTKVDKKVRTEPKSSDKTHTCPPCPSGAPELLGGPSVFLFPPKPKDTLMISRTPEVTCVVVDVSHEDPEVKFNWYVDGVEVHNAKTKPREEQYNSTYRVVSVLTVLHQDWLNGKEYKCKVSNKALPAPIEKTISKAKGQPREPQVYTLPPSRDELTKNQVSLTCLVKGFYPSDIAVEWESNGQPENNYKTTPPVLDSDGSFALASKLTVDKSRWQQGNVFSCSVMHEALHNHYTQKSLSLSPGKSRASTKGPSVFPLAPSSKSTSGGTAALGCLVKDYFPEPVTVSWNSGALTSGVHTFPAVLQSSGLYSLSSVVTVPSSSLGTQTYICNVNHKPSNTKVDKKV

SEQ ID NO: 43 - DNA, 1404 bp, Artificial Sequence
  X0123
  sig_peptide (1)...(60)
atggaagcaccagcgcagcttctcttcctcctgctactctggctcccagataccaccggtactgtggctgcaccatctgtcttcatcttcccgccatctgatgagcagttgaaatctggaactgcctctgttgtgtgcctgctgaataacttctatcccagagaggccaaagtacagtggaaggtggataacgccctccaatcgggtaactcccaggagagtgtcacagagcaggacagcaaggacagcacctacagcctcagcagcaccctgacgctgagcaaagcagactacgagaaacacaaagtctacgcctgcgaagtcacccatcagggcctgagctcgcccgtcacaaagagcttcaacaggggagagcgtacggagcccaaatcttctgacaaaactcacacatgcccaccgtgcccatccggagcacctgaactcctgggtggaccgtcagtcttcctcttccccccaaaacccaaggacaccctcatgatctcccggacccctgaggtcacatgcgtggtggtggacgtgagccacgaagaccctgaggtcaagttcaactggtacgtggacggcgtggaggtgcataatgccaagacaaagccgcgggaggagcagtacaacagcacgtaccgtgtggtcagcgtcctcaccgtcctgcaccaggactggctgaatggcaaggagtacaagtgcaaggtctccaacaaagccctcccagcccccatcgagaaaaccatctccaaagccaaagggcagccccgagaaccacaggtgtacaccctgcccccatcccgggatgagctgaccaagaaccaggtcagcctgacctgcctggtcaaaggcttctatccaagcgacatcgccgtggagtgggagagcaatgggcagccggagaacaactacaagaccacgcctcccgtgctggactccgacggctccttcgcactcgccagcaagctcaccgtggacaagagcaggtggcagcaggggaacgtcttctcatgctccgtgatgcatgaggctctgcacaaccactacacgcagaagagcctctccctgtctccgggtaaatctagaactgtggctgcaccatctgtcttcatcttcccgccatctgatgagcagttgaaatctggaactgcctctgttgtgtgcctgctgaataacttctatcccagagaggccaaagtacagtggaaggtggataacgccctccaatcgggtaactcccaggagagtgtcacagagcaggacagcaaggacagcacctacagcctcagcagcaccctgacgctgagcaaagcagactacgagaaacacaaagtctacgcctgcgaagtcacccatcagggcctgagctcgcccgtcacaaagagcttcaacaggggagag

SEQ ID NO: 44 - protein, 468 aa, Artificial Sequence
  X0123
  SIGNAL (1)...(20)
MEAPAQLLFLLLLWLPDTTGTVAAPSVFIFPPSDEQLKSGTASVVCLLNNFYPREAKVQWKVDNALQSGNSQESVTEQDSKDSTYSLSSTLTLSKADYEKHKVYACEVTHQGLSSPVTKSFNRGERTEPKSSDKTHTCPPCPSGAPELLGGPSVFLFPPKPKDTLMISRTPEVTCVVVDVSHEDPEVKFNWYVDGVEVHNAKTKPREEQYNSTYRVVSVLTVLHQDWLNGKEYKCKVSNKALPAPIEKTISKAKGQPREPQVYTLPPSRDELTKNQVSLTCLVKGFYPSDIAVEWESNGQPENNYKTTPPVLDSDGSFALASKLTVDKSRWQQGNVFSCSVMHEALHNHYTQKSLSLSPGKSRTVAAPSVFIFPPSDEQLKSGTASVVCLLNNFYPREAKVQWKVDNALQSGNSQESVTEQDSKDSTYSLSSTLTLSKADYEKHKVYACEVTHQGLSSPVTKSFNRGE

SEQ ID NO: 45 - DNA, 2148 bp, Artificial Sequence
  X0130
  sig_peptide (1)...(60)
atggaagcaccagcgcagcttctcttcctcctgctactctggctcccagataccaccggtcaggtgcagctgaaggagtcaggacctggcagcgtggcgccctcacagagcctgtccatcacatgcaccgtctcagggttctcattaaccggctatggtgtaaactgggttcgccagcctccaggaaagggtctggagtggctgggaatgatatggggtgatggaagcacagactataattcagctctcaaatccagactatcgatcaccaaggacaactccaagagccaagttttcttaaaaatgaacagtctgcaaactgatgacacagccagatactactgtgctcgggatggttatagtaactttcattactatgttatggactactggggtcaaggaacctcagtcaccgtctcctctgggggtggaggctctggtggcggtggatccggcggaggtgggtcgggtggcggcggatctgacattgtgctcacccaatctccagcttctttggctgtgtctctaggtcagagagccaccatctcctgcagagccagtgaaagtgttgaatattatgtcacaagtttaatgcagtggtaccaacagaaaccaggacagccacccaaactcctcatctctgctgctagcaacgtagaatctggggtccctgccaggtttagtggcagtgggtctgggacagactttagcctcaacatccatcctgtggaggaggatgatattgcaatgtatttctgtcagcaaagtaggaaggttccatggacgttcggtggaggcaccaagctggaaatcaagtcctcgagcgcctccaccaagggcccatcggtcttccccctggcaccctcctccaagagcacctctgggggcacagcggccctgggctgcctggtcaaggactacttccccgagccggtgacggtgtcgtggaactcaggcgccctgaccagcggcgtgcacaccttcccggctgtcctacagtcctcaggactctactccctcagcagcgtggtgaccgtgccctccagcagcttgggcacccagacctacatctgcaacgtgaatcacaagcccagcaacaccaaggtggacaagaaagttcgtacggagcccaaatcttctgacaaaactcacacatgcccaccgtgcccatccggagcacctgaactcctgggtggaccgtcagtcttcctcttccccccaaaacccaaggacaccctcatgatctcccggacccctgaggtcacatgcgtggtggtggacgtgagccacgaagaccctgaggtcaagttcaactggtacgtggacggcgtggaggtgcataatgccaagacaaagccgcgggaggagcagtacaacagcacgtaccgtgtggtcagcgtcctcaccgtcctgcaccaggactggctgaatggcaaggagtacaagtgcaaggtctccaacaaagccctcccagcccccatcgagaaaaccatctccaaagccaaagggcagccccgagaaccacaggtgtacaccctgcccccatcccgggatgagctgaccaagaaccaggtcagcctgacctgcctggtcaaaggcttctatccaagcgacatcgccgtggagtgggagagcaatgggcagccggagaacaactacaagaccacgcctcccgtgctggactccgacggctccttcttcctctacagcaagctcaccgtggacaagagcaggtggcagcaggggaacgtcttctcatgctccgtgatgcatgaggctctgcacaaccactacacgcagaagagcctctccctgtctccgggtaaatctagaactgtggctgcaccatctgtcttcatcttcccgccatctgatgagcagttgaaatctggaactgcctctgttgtgtgcctgctgaataacttctatcccagagaggccaaagtacagtggaaggtggataacgccctccaatcgggtaactcccaggagagtgtcacagagcaggacagcaaggacagcacctacagcctcagcagcaccctgacgctgagcaaagcagactacgagaaacacaaagtctacgcctgcgaagtcacccatcagggcctgagctcgcccgtcacaaagagcttcaacaggggagag

SEQ ID NO: 46 - protein, 716 aa, Artificial Sequence
  X0130
  SIGNAL (1)...(20)
MEAPAQLLFLLLLWLPDTTGQVQLKESGPGSVAPSQSLSITCTVSGFSLTGYGVNWVRQPPGKGLEWLGMIWGDGSTDYNSALKSRLSITKDNSKSQVFLKMNSLQTDDTARYYCARDGYSNFHYYVMDYWGQGTSVTVSSGGGGSGGGGSGGGGSGGGGSDIVLTQSPASLAVSLGQRATISCRASESVEYYVTSLMQWYQQKPGQPPKLLISAASNVESGVPARFSGSGSGTDFSLNIHPVEEDDIAMYFCQQSRKVPWTFGGGTKLEIKSSSASTKGPSVFPLAPSSKSTSGGTAALGCLVKDYFPEPVTVSWNSGALTSGVHTFPAVLQSSGLYSLSSVVTVPSSSLGTQTYICNVNHKPSNTKVDKKVRTEPKSSDKTHTCPPCPSGAPELLGGPSVFLFPPKPKDTLMISRTPEVTCVVVDVSHEDPEVKFNWYVDGVEVHNAKTKPREEQYNSTYRVVSVLTVLHQDWLNGKEYKCKVSNKALPAPIEKTISKAKGQPREPQVYTLPPSRDELTKNQVSLTCLVKGFYPSDIAVEWESNGQPENNYKTTPPVLDSDGSFFLYSKLTVDKSRWQQGNVFSCSVMHEALHNHYTQKSLSLSPGKSRTVAAPSVFIFPPSDEQLKSGTASVVCLLNNFYPREAKVQWKVDNALQSGNSQESVTEQDSKDSTYSLSSTLTLSKADYEKHKVYACEVTHQGLSSPVTKSFNRGE

SEQ ID NO: 47 - DNA, 1383 bp, Artificial Sequence
  X0131
  sig_peptide (1)...(60)
atggaagcaccagcgcagcttctcttcctcctgctactctggctcccagataccaccggtactgtggctgcaccatctgtcttcatcttcccgccatctgatgagcagttgaaatctggaactgcctctgttgtgtgcctgctgaataacttctatcccagagaggccaaagtacagtggaaggtggataacgccctccaatcgggtaactcccaggagagtgtcacagagcaggacagcaaggacagcacctacagcctcagcagcaccctgacgctgagcaaagcagactacgagaaacacaaagtctacgcctgcgaagtcacccatcagggcctgagctcgcccgtcacaaagagcttcaacaggggagagcgtacggagcccaaatcttctgacaaaactcacacatgcccaccgtgcccatccggagcacctgaactcctgggtggaccgtcagtcttcctcttccccccaaaacccaaggacaccctcatgatctcccggacccctgaggtcacatgcgtggtggtggacgtgagccacgaagaccctgaggtcaagttcaactggtacgtggacggcgtggaggtgcataatgccaagacaaagccgcgggaggagcagtacaacagcacgtaccgtgtggtcagcgtcctcaccgtcctgcaccaggactggctgaatggcaaggagtacaagtgcaaggtctccaacaaagccctcccagcccccatcgagaaaaccatctccaaagccaaagggcagccccgagaaccacaggtgtacaccctgcccccatcccgggatgagctgaccaagaaccaggtcagcctgacctgcctggtcaaaggcttctatccaagcgacatcgccgtggagtgggagagcaatgggcagccggagaacaactacaagaccacgcctcccgtgctggactccgacggctccttcttcctctacagcaagctcaccgtggacaagagcaggtggcagcaggggaacgtcttctcatgctccgtgatgcatgaggctctgcacaaccactacacgcagaagagcctctccctgtctccgggtaaatctagagcctccaccaagggcccatcggtcttccccctggcaccctcctccaagagcacctctgggggcacagcggccctgggctgcctggtcaaggactacttccccgagccggtgacggtgtcgtggaactcaggcgccctgaccagcggcgtgcacaccttcccggctgtcctacagtcctcaggactctactccctcagcagcgtggtgaccgtgccctccagcagcttgggcacccagacctacatctgcaacgtgaatcacaagcccagcaacaccaaggtggacaagaaagtt

SEQ ID NO: 48 - protein, 461 aa, Artificial Sequence
  X0131
  SIGNAL (1)...(20)
MEAPAQLLFLLLLWLPDTTGTVAAPSVFIFPPSDEQLKSGTASVVCLLNNFYPREAKVQWKVDNALQSGNSQESVTEQDSKDSTYSLSSTLTLSKADYEKHKVYACEVTHQGLSSPVTKSFNRGERTEPKSSDKTHTCPPCPSGAPELLGGPSVFLFPPKPKDTLMISRTPEVTCVVVDVSHEDPEVKFNWYVDGVEVHNAKTKPREEQYNSTYRVVSVLTVLHQDWLNGKEYKCKVSNKALPAPIEKTISKAKGQPREPQVYTLPPSRDELTKNQVSLTCLVKGFYPSDIAVEWESNGQPENNYKTTPPVLDSDGSFFLYSKLTVDKSRWQQGNVFSCSVMHEALHNHYTQKSLSLSPGKSRASTKGPSVFPLAPSSKSTSGGTAALGCLVKDYFPEPVTVSWNSGALTSGVHTFPAVLQSSGLYSLSSVVTVPSSSLGTQTYICNVNHKPSNTKVDKKV

SEQ ID NO: 49 - DNA, 1083 bp, Artificial Sequence
  X0133
  sig_peptide (1)...(60)
atggaagcaccagcgcagcttctcttcctcctgctactctggctcccagataccaccggtcagcccaaggccaaccccactgtcactctgttcccgccctcctctgaggagctccaagccaacaaggccacactagtgtgtctgatcagtgacttctacccgggagctgtgacagtggcctggaaggcagatggcagccccgtcaaggcgggagtggagaccaccaaaccctccaaacagagcaataacaagtacgcggccagcagctacctgagcctgacgcccgagcagtggaagtcccacagaagctacagctgccaggtcacgcatgaagggagcaccgtggagaagacagtggcccctacagaatcctcacgtacggagcccaaatcttctgacaaaactcacacatgcccaccgtgcccatccggagcacctgaactcctgggtggaccgtcagtcttcctcttccccccaaaacccaaggacaccctcatgatctcccggacccctgaggtcacatgcgtggtggtggacgtgagccacgaagaccctgaggtcaagttcaactggtacgtggacggcgtggaggtgcataatgccaagacaaagccgcgggaggagcagtacaacagcacgtaccgtgtggtcagcgtcctcaccgtcctgcaccaggactggctgaatggcaaggagtacaagtgcaaggtctccaacaaagccctcccagcccccatcgagaaaaccatctccaaagccaaagggcagccccgagaaccacaggtgtacaccctgcccccatcccgggatgagctgaccaagaaccaggtcagcctgacctgcctggtcaaaggcttctatccaagcgacatcgccgtggagtgggagagcaatgggcagccggagaacaactacaagaccacgcctcccgtgctggactccgacggctccttcttcctctacagcaagctcaccgtggacaagagcaggtggcagcaggggaacgtcttctcatgctccgtgatgcatgaggctctgcacaaccactacacgcagaagagcctctccctgtctccgggtaaa

SEQ ID NO: 50 - protein, 361 aa, Artificial Sequence
  X0133
  SIGNAL (1)...(20)
MEAPAQLLFLLLLWLPDTTGQPKANPTVTLFPPSSEELQANKATLVCLISDFYPGAVTVAWKADGSPVKAGVETTKPSKQSNNKYAASSYLSLTPEQWKSHRSYSCQVTHEGSTVEKTVAPTESSRTEPKSSDKTHTCPPCPSGAPELLGGPSVFLFPPKPKDTLMISRTPEVTCVVVDVSHEDPEVKFNWYVDGVEVHNAKTKPREEQYNSTYRVVSVLTVLHQDWLNGKEYKCKVSNKALPAPIEKTISKAKGQPREPQVYTLPPSRDELTKNQVSLTCLVKGFYPSDIAVEWESNGQPENNYKTTPPVLDSDGSFFLYSKLTVDKSRWQQGNVFSCSVMHEALHNHYTQKSLSLSPGK

SEQ ID NO: 51 - DNA, 1089 bp, Artificial Sequence
  X0134
  sig_peptide (1)...(60)
atggaagcaccagcgcagcttctcttcctcctgctactctggctcccagataccaccggttcctcggagcccaaatcttctgacaaaactcacacatgcccaccgtgcccatccggagcacctgaactcctgggtggaccgtcagtcttcctcttccccccaaaacccaaggacaccctcatgatctcccggacccctgaggtcacatgcgtggtggtggacgtgagccacgaagaccctgaggtcaagttcaactggtacgtggacggcgtggaggtgcataatgccaagacaaagccgcgggaggagcagtacaacagcacgtaccgtgtggtcagcgtcctcaccgtcctgcaccaggactggctgaatggcaaggagtacaagtgcaaggtctccaacaaagccctcccagcccccatcgagaaaaccatctccaaagccaaagggcagccccgagaaccacaggtgtacaccctgcccccatcccgggatgagctgaccaagaaccaggtcagcctgacctgcctggtcaaaggcttctatccaagcgacatcgccgtggagtgggagagcaatgggcagccggagaacaactacaagaccacgcctcccgtgctggactccgacggctccttcttcctctacagcaagctcaccgtggacaagagcaggtggcagcaggggaacgtcttctcatgctccgtgatgcatgaggctctgcacaaccactacacgcagaagagcctctccctgtctccgggtaaatctagacagcccaaggccaaccccactgtcactctgttcccgccctcctctgaggagctccaagccaacaaggccacactagtgtgtctgatcagtgacttctacccgggagctgtgacagtggcctggaaggcagatggcagccccgtcaaggcgggagtggagaccaccaaaccctccaaacagagcaacaacaagtacgcggccagcagctacctgagcctgacgcccgagcagtggaagtcccacagaagctacagctgccaggtcacgcatgaagggagcaccgtggagaagacagtggcccctacagaatcctca

SEQ ID NO: 52 - protein, 363 aa, Artificial Sequence
  X0134
  SIGNAL (1)...(20)
MEAPAQLLFLLLLWLPDTTGSSEPKSSDKTHTCPPCPSGAPELLGGPSVFLFPPKPKDTLMISRTPEVTCVVVDVSHEDPEVKFNWYVDGVEVHNAKTKPREEQYNSTYRVVSVLTVLHQDWLNGKEYKCKVSNKALPAPIEKTISKAKGQPREPQVYTLPPSRDELTKNQVSLTCLVKGFYPSDIAVEWESNGQPENNYKTTPPVLDSDGSFFLYSKLTVDKSRWQQGNVFSCSVMHEALHNHYTQKSLSLSPGKSRQPKANPTVTLFPPSSEELQANKATLVCLISDFYPGAVTVAWKADGSPVKAGVETTKPSKQSNNKYAASSYLSLTPEQWKSHRSYSCQVTHEGSTVEKTVAPTESS

SEQ ID NO: 53 - DNA, 1089 bp, Artificial Sequence
  X0136
  sig_peptide (1)...(60)
atggaagcaccagcgcagcttctcttcctcctgctactctggctcccagataccaccggttcctcggagcccaaatcttctgacaaaactcacacatgcccaccgtgcccatccggagcacctgaactcctgggtggaccgtcagtcttcctcttccccccaaaacccaaggacaccctcatgatctcccggacccctgaggtcacatgcgtggtggtggacgtgagccacgaagaccctgaggtcaagttcaactggtacgtggacggcgtggaggtgcataatgccaagacaaagccgcgggaggagcagtacaacagcacgtaccgtgtggtcagcgtcctcaccgtcctgcaccaggactggctgaatggcaaggagtacaagtgcaaggtctccaacaaagccctcccagcccccatcgagaaaaccatctccaaagccaaagggcagccccgagaaccacaggtgtacaccctgcccccatcccgggatgagctgaccaagaaccaggtcagcctgacctgcctggtcaaaggcttctatccaagcgacatcgccgtggagtgggagagcaatgggcagccggagaacaactacaagaccacgcctcccgtgctggactccgacggctccttcgcactctacagcaagctcaccgtggacaagagcaggtggcagcaggggaacgtcttctcatgctccgtgatgcatgaggctctgcacaaccactacacgcagaagagcctctccctgtctccgggtaaatctagaactgtggctgcaccatctgtcttcatcttcccgccatctgatgagcagttgaaatctggaactgcctctgttgtgtgcctgctgaataacttctatcccagagaggccaaagtacagtggaaggtggataacgccctccaatcgggtaactcccaggagagtgtcacagagcaggacagcaaggacagcacctacagcctcagcagcaccctgacgctgagcaaagcagactacgagaaacacaaagtctacgcctgcgaagtcacccatcagggcctgagctcgcccgtcacaaagagcttcaacaggggagag

SEQ ID NO: 54 - protein, 363 aa, Artificial Sequence
  X0136
  SIGNAL (1)...(20)
MEAPAQLLFLLLLWLPDTTGSSEPKSSDKTHTCPPCPSGAPELLGGPSVFLFPPKPKDTLMISRTPEVTCVVVDVSHEDPEVKFNWYVDGVEVHNAKTKPREEQYNSTYRVVSVLTVLHQDWLNGKEYKCKVSNKALPAPIEKTISKAKGQPREPQVYTLPPSRDELTKNQVSLTCLVKGFYPSDIAVEWESNGQPENNYKTTPPVLDSDGSFALYSKLTVDKSRWQQGNVFSCSVMHEALHNHYTQKSLSLSPGKSRTVAAPSVFIFPPSDEQLKSGTASVVCLLNNFYPREAKVQWKVDNALQSGNSQESVTEQDSKDSTYSLSSTLTLSKADYEKHKVYACEVTHQGLSSPVTKSFNRGE

SEQ ID NO: 55 - DNA, 1827 bp, Artificial Sequence
  X0137
  sig_peptide (1)...(60)
atggaagcaccagcgcagcttctcttcctcctgctactctggctcccagataccaccggtcaggtgcagctgaaggagtcaggacctggcagcgtggcgccctcacagagcctgtccatcacatgcaccgtctcagggttctcattaaccggctatggtgtaaactgggttcgccagcctccaggaaagggtctggagtggctgggaatgatatggggtgatggaagcacagactataattcagctctcaaatccagactatcgatcaccaaggacaactccaagagccaagttttcttaaaaatgaacagtctgcaaactgatgacacagccagatactactgtgctcgggatggttatagtaactttcattactatgttatggactactggggtcaaggaacctcagtcaccgtctcctctgggggtggaggctctggtggcggtggatccggcggaggtgggtcgggtggcggcggatctgacattgtgctcacccaatctccagcttctttggctgtgtctctaggtcagagagccaccatctcctgcagagccagtgaaagtgttgaatattatgtcacaagtttaatgcagtggtaccaacagaaaccaggacagccacccaaactcctcatctctgctgctagcaacgtagaatctggggtccctgccaggtttagtggcagtgggtctgggacagactttagcctcaacatccatcctgtggaggaggatgatattgcaatgtatttctgtcagcaaagtaggaaggttccatggacgttcggtggaggcaccaagctggaaatcaagtcctcgagcgagcccaaatcttctgacaaaactcacacatgcccaccgtgcccatccggagcacctgaactcctgggtggaccgtcagtcttcctcttccccccaaaacccaaggacaccctcatgatctcccggacccctgaggtcacatgcgtggtggtggacgtgagccacgaagaccctgaggtcaagttcaactggtacgtggacggcgtggaggtgcataatgccaagacaaagccgcgggaggagcagtacaacagcacgtaccgtgtggtcagcgtcctcaccgtcctgcaccaggactggctgaatggcaaggagtacaagtgcaaggtctccaacaaagccctcccagcccccatcgagaaaaccatctccaaagccaaagggcagccccgagaaccacaggtgtacaccctgcccccatcccgggatgagctgaccaagaaccaggtcagcctgacctgcctggtcaaaggcttctatccaagcgacatcgccgtggagtgggagagcaatgggcagccggagaacaactacaagaccacgcctcccgtgctggactccgacggctccttcgcactctacagcaagctcaccgtggacaagagcaggtggcagcaggggaacgtcttctcatgctccgtgatgcatgaggctctgcacaaccactacacgcagaagagcctctccctgtctccgggtaaatctagagcctccaccaagggcccatcggtcttccccctggcaccctcctccaagagcacctctgggggcacagcggccctgggctgcctggtcaaggactacttccccgagccggtgacggtgtcgtggaactcaggcgccctgaccagcggcgtgcacaccttcccggctgtcctacagtcctcaggactctactccctcagcagcgtggtgaccgtgccctccagcagcttgggcacccagacctacatctgcaacgtgaatcacaagcccagcaacaccaaggtggacaagaaagtt

SEQ ID NO: 56 - protein, 609 aa, Artificial Sequence
  X0137
  SIGNAL (1)...(20)
MEAPAQLLFLLLLWLPDTTGQVQLKESGPGSVAPSQSLSITCTVSGFSLTGYGVNWVRQPPGKGLEWLGMIWGDGSTDYNSALKSRLSITKDNSKSQVFLKMNSLQTDDTARYYCARDGYSNFHYYVMDYWGQGTSVTVSSGGGGSGGGGSGGGGSGGGGSDIVLTQSPASLAVSLGQRATISCRASESVEYYVTSLMQWYQQKPGQPPKLLISAASNVESGVPARFSGSGSGTDFSLNIHPVEEDDIAMYFCQQSRKVPWTFGGGTKLEIKSSSEPKSSDKTHTCPPCPSGAPELLGGPSVFLFPPKPKDTLMISRTPEVTCVVVDVSHEDPEVKFNWYVDGVEVHNAKTKPREEQYNSTYRVVSVLTVLHQDWLNGKEYKCKVSNKALPAPIEKTISKAKGQPREPQVYTLPPSRDELTKNQVSLTCLVKGFYPSDIAVEWESNGQPENNYKTTPPVLDSDGSFALYSKLTVDKSRWQQGNVFSCSVMHEALHNHYTQKSLSLSPGKSRASTKGPSVFPLAPSSKSTSGGTAALGCLVKDYFPEPVTVSWNSGALTSGVHTFPAVLQSSGLYSLSSVVTVPSSSLGTQTYICNVNHKPSNTKVDKKV

SEQ ID NO: 57 - DNA, 1089 bp, Artificial Sequence
  X0139
  sig_peptide (1)...(60)
atggaagcaccagcgcagcttctcttcctcctgctactctggctcccagataccaccggttcctcggagcccaaatcttctgacaaaactcacacatgcccaccgtgcccatccggagcacctgaactcctgggtggaccgtcagtcttcctcttccccccaaaacccaaggacaccctcatgatctcccggacccctgaggtcacatgcgtggtggtggacgtgagccacgaagaccctgaggtcaagttcaactggtacgtggacggcgtggaggtgcataatgccaagacaaagccgcgggaggagcagtacaacagcacgtaccgtgtggtcagcgtcctcaccgtcctgcaccaggactggctgaatggcaaggagtacaagtgcaaggtctccaacaaagccctcccagcccccatcgagaaaaccatctccaaagccaaagggcagccccgagaaccacaggtgtacaccctgcccccatcccgggatgagctgaccaagaaccaggtcagcctgacctgcctggtcaaaggcttctatccaagcgacatcgccgtggagtgggagagcaatgggcagccggagaacaactacaagaccacgcctcccgtgctggactccgacggctccttcttcctcgccagcaagctcaccgtggacaagagcaggtggcagcaggggaacgtcttctcatgctccgtgatgcatgaggctctgcacaaccactacacgcagaagagcctctccctgtctccgggtaaatctagaactgtggctgcaccatctgtcttcatcttcccgccatctgatgagcagttgaaatctggaactgcctctgttgtgtgcctgctgaataacttctatcccagagaggccaaagtacagtggaaggtggataacgccctccaatcgggtaactcccaggagagtgtcacagagcaggacagcaaggacagcacctacagcctcagcagcaccctgacgctgagcaaagcagactacgagaaacacaaagtctacgcctgcgaagtcacccatcagggcctgagctcgcccgtcacaaagagcttcaacaggggagag

SEQ ID NO: 58 - protein, 363 aa, Artificial Sequence
  X0139
  SIGNAL (1)...(20)
MEAPAQLLFLLLLWLPDTTGSSEPKSSDKTHTCPPCPSGAPELLGGPSVFLFPPKPKDTLMISRTPEVTCVVVDVSHEDPEVKFNWYVDGVEVHNAKTKPREEQYNSTYRVVSVLTVLHQDWLNGKEYKCKVSNKALPAPIEKTISKAKGQPREPQVYTLPPSRDELTKNQVSLTCLVKGFYPSDIAVEWESNGQPENNYKTTPPVLDSDGSFFLASKLTVDKSRWQQGNVFSCSVMHEALHNHYTQKSLSLSPGKSRTVAAPSVFIFPPSDEQLKSGTASVVCLLNNFYPREAKVQWKVDNALQSGNSQESVTEQDSKDSTYSLSSTLTLSKADYEKHKVYACEVTHQGLSSPVTKSFNRGE

SEQ ID NO: 59 - DNA, 1827 bp, Artificial Sequence
  X0140
  sig_peptide (1)...(60)
atggaagcaccagcgcagcttctcttcctcctgctactctggctcccagataccaccggtcaggtgcagctgaaggagtcaggacctggcagcgtggcgccctcacagagcctgtccatcacatgcaccgtctcagggttctcattaaccggctatggtgtaaactgggttcgccagcctccaggaaagggtctggagtggctgggaatgatatggggtgatggaagcacagactataattcagctctcaaatccagactatcgatcaccaaggacaactccaagagccaagttttcttaaaaatgaacagtctgcaaactgatgacacagccagatactactgtgctcgggatggttatagtaactttcattactatgttatggactactggggtcaaggaacctcagtcaccgtctcctctgggggtggaggctctggtggcggtggatccggcggaggtgggtcgggtggcggcggatctgacattgtgctcacccaatctccagcttctttggctgtgtctctaggtcagagagccaccatctcctgcagagccagtgaaagtgttgaatattatgtcacaagtttaatgcagtggtaccaacagaaaccaggacagccacccaaactcctcatctctgctgctagcaacgtagaatctggggtccctgccaggtttagtggcagtgggtctgggacagactttagcctcaacatccatcctgtggaggaggatgatattgcaatgtatttctgtcagcaaagtaggaaggttccatggacgttcggtggaggcaccaagctggaaatcaagtcctcgagcgagcccaaatcttctgacaaaactcacacatgcccaccgtgcccatccggagcacctgaactcctgggtggaccgtcagtcttcctcttccccccaaaacccaaggacaccctcatgatctcccggacccctgaggtcacatgcgtggtggtggacgtgagccacgaagaccctgaggtcaagttcaactggtacgtggacggcgtggaggtgcataatgccaagacaaagccgcgggaggagcagtacaacagcacgtaccgtgtggtcagcgtcctcaccgtcctgcaccaggactggctgaatggcaaggagtacaagtgcaaggtctccaacaaagccctcccagcccccatcgagaaaaccatctccaaagccaaagggcagccccgagaaccacaggtgtacaccctgcccccatcccgggatgagctgaccaagaaccaggtcagcctgacctgcctggtcaaaggcttctatccaagcgacatcgccgtggagtgggagagcaatgggcagccggagaacaactacaagaccacgcctcccgtgctggactccgacggctccttcttcctcgccagcaagctcaccgtggacaagagcaggtggcagcaggggaacgtcttctcatgctccgtgatgcatgaggctctgcacaaccactacacgcagaagagcctctccctgtctccgggtaaatctagagcctccaccaagggcccatcggtcttccccctggcaccctcctccaagagcacctctgggggcacagcggccctgggctgcctggtcaaggactacttccccgagccggtgacggtgtcgtggaactcaggcgccctgaccagcggcgtgcacaccttcccggctgtcctacagtcctcaggactctactccctcagcagcgtggtgaccgtgccctccagcagcttgggcacccagacctacatctgcaacgtgaatcacaagcccagcaacaccaaggtggacaagaaagtt

SEQ ID NO: 60 - protein, 609 aa, Artificial Sequence
  X0140
  SIGNAL (1)...(20)
MEAPAQLLFLLLLWLPDTTGQVQLKESGPGSVAPSQSLSITCTVSGFSLTGYGVNWVRQPPGKGLEWLGMIWGDGSTDYNSALKSRLSITKDNSKSQVFLKMNSLQTDDTARYYCARDGYSNFHYYVMDYWGQGTSVTVSSGGGGSGGGGSGGGGSGGGGSDIVLTQSPASLAVSLGQRATISCRASESVEYYVTSLMQWYQQKPGQPPKLLISAASNVESGVPARFSGSGSGTDFSLNIHPVEEDDIAMYFCQQSRKVPWTFGGGTKLEIKSSSEPKSSDKTHTCPPCPSGAPELLGGPSVFLFPPKPKDTLMISRTPEVTCVVVDVSHEDPEVKFNWYVDGVEVHNAKTKPREEQYNSTYRVVSVLTVLHQDWLNGKEYKCKVSNKALPAPIEKTISKAKGQPREPQVYTLPPSRDELTKNQVSLTCLVKGFYPSDIAVEWESNGQPENNYKTTPPVLDSDGSFFLASKLTVDKSRWQQGNVFSCSVMHEALHNHYTQKSLSLSPGKSRASTKGPSVFPLAPSSKSTSGGTAALGCLVKDYFPEPVTVSWNSGALTSGVHTFPAVLQSSGLYSLSSVVTVPSSSLGTQTYICNVNHKPSNTKVDKKV

SEQ ID NO: 61 - DNA, 2148 bp, Artificial Sequence
  X0146
  sig_peptide (1)...(60)
atggaagcaccagcgcagcttctcttcctcctgctactctggctcccagataccaccggtcaggtgcagctgaaggagtcaggacctggcagcgtggcgccctcacagagcctgtccatcacatgcaccgtctcagggttctcattaaccggctatggtgtaaactgggttcgccagcctccaggaaagggtctggagtggctgggaatgatatggggtgatggaagcacagactataattcagctctcaaatccagactatcgatcaccaaggacaactccaagagccaagttttcttaaaaatgaacagtctgcaaactgatgacacagccagatactactgtgctcgggatggttatagtaactttcattactatgttatggactactggggtcaaggaacctcagtcaccgtctcctctgggggtggaggctctggtggcggtggatccggcggaggtgggtcgggtggcggcggatctgacattgtgctcacccaatctccagcttctttggctgtgtctctaggtcagagagccaccatctcctgcagagccagtgaaagtgttgaatattatgtcacaagtttaatgcagtggtaccaacagaaaccaggacagccacccaaactcctcatctctgctgctagcaacgtagaatctggggtccctgccaggtttagtggcagtgggtctgggacagactttagcctcaacatccatcctgtggaggaggatgatattgcaatgtatttctgtcagcaaagtaggaaggttccatggacgttcggtggaggcaccaagctggaaatcaagtcctcgagcgcctccaccaagggcccatcggtcttccccctggcaccctcctccaagagcacctctgggggcacagcggccctgggctgcctggtcaaggactacttccccgagccggtgacggtgtcgtggaactcaggcgccctgaccagcggcgtgcacaccttcccggctgtcctacagtcctcaggactctactccctcagcagcgtggtgaccgtgccctccagcagcttgggcacccagacctacatctgcaacgtgaatcacaagcccagcaacaccaaggtggacaagaaagttcgtacggagcccaaatcttctgacaaaactcacacatgcccaccgtgcccatccggagcacctgaactcctgggtggaccgtcagtcttcctcttccccccaaaacccaaggacaccctcatgatctcccggacccctgaggtcacatgcgtggtggtggacgtgagccacgaagaccctgaggtcaagttcaactggtacgtggacggcgtggaggtgcataatgccaagacaaagccgcgggaggagcagtacaacagcacgtaccgtgtggtcagcgtcctcaccgtcctgcaccaggactggctgaatggcaaggagtacaagtgcaaggtctccaacaaagccctcccagcccccatcgagaaaaccatctccaaagccaaagggcagccccgagaaccacaggtgtacaccctgcccccatcccgggatgagctgaccaagaaccaggtcagcctgacctgcctggtcaaaggcttctatccaagcgacatcgccgtggagtgggagagcaatgggcagccggagaacaactacaagaccacgcctcccgtgctggactccgacggctccttcttcctctacagcaagctcaccgtggacaagagcaggtggcagcaggggaacgtcttctcatgctccgtgatgcatgaggctctgcacaaccactacacgcagaagagcctctccctgtctccgggtaaatctagacagcccaaggccaaccccactgtcactctgttcccgccctcctctgaggagctccaagccaacaaggccacactagtgtgtctgatcagtgacttctacccgggagctgtgacagtggcctggaaggcagatggcagccccgtcaaggcgggagtggagaccaccaaaccctccaaacagagcaacaacaagtacgcggccagcagctacctgagcctgacgcccgagcagtggaagtcccacagaagctacagctgccaggtcacgcatgaagggagcaccgtggagaagacagtggcccctacagaatcctca

SEQ ID NO: 62 - protein, 716 aa, Artificial Sequence [sequence omitted]

SEQ ID NO: 63 - DNA, 1383 bp, Artificial Sequence
  X0147
  sig_peptide (1)...(60)
atggaagcaccagcgcagcttctcttcctcctgctactctggctcccagataccaccggtcagcccaaggccaaccccactgtcactctgttcccgccctcctctgaggagctccaagccaacaaggccacactagtgtgtctgatcagtgacttctacccgggagctgtgacagtggcctggaaggcagatggcagccccgtcaaggcgggagtggagaccaccaaaccctccaaacagagcaacaacaagtacgcggccagcagctacctgagcctgacgcccgagcagtggaagtcccacagaagctacagctgccaggtcacgcatgaagggagcaccgtggagaagacagtggcccctacagaatcctcacgtacggagcccaaatcttctgacaaaactcacacatgcccaccgtgcccatccggagcacctgaactcctgggtggaccgtcagtcttcctcttccccccaaaacccaaggacaccctcatgatctcccggacccctgaggtcacatgcgtggtggtggacgtgagccacgaagaccctgaggtcaagttcaactggtacgtggacggcgtggaggtgcataatgccaagacaaagccgcgggaggagcagtacaacagcacgtaccgtgtggtcagcgtcctcaccgtcctgcaccaggactggctgaatggcaaggagtacaagtgcaaggtctccaacaaagccctcccagcccccatcgagaaaaccatctccaaagccaaagggcagccccgagaaccacaggtgtacaccctgcccccatcccgggatgagctgaccaagaaccaggtcagcctgacctgcctggtcaaaggcttctatccaagcgacatcgccgtggagtgggagagcaatgggcagccggagaacaactacaagaccacgcctcccgtgctggactccgacggctccttcttcctctacagcaagctcaccgtggacaagagcaggtggcagcaggggaacgtcttctcatgctccgtgatgcatgaggctctgcacaaccactacacgcagaagagcctctccctgtctccgggtaaatctagagcctccaccaagggcccatcggtcttccccctggcaccctcctccaagagcacctctgggggcacagcggccctgggctgcctggtcaaggactacttccccgagccggtgacggtgtcgtggaactcaggcgccctgaccagcggcgtgcacaccttcccggctgtcctacagtcctcaggactctactccctcagcagcgtggtgaccgtgccctccagcagcttgggcacccagacctacatctgcaacgtgaatcacaagcccagcaacaccaaggtggacaagaaagtt

SEQ ID NO: 64 - protein, 461 aa, Artificial Sequence
  X0147
  SIGNAL (1)...(20)
MEAPAQLLFLLLLWLPDTTGQPKANPTVTLFPPSSEELQANKATLVCLISDFYPGAVTVAWKADGSPVKAGVETTKPSKQSNNKYAASSYLSLTPEQWKSHRSYSCQVTHEGSTVEKTVAPTESSRTEPKSSDKTHTCPPCPSGAPELLGGPSVFLFPPKPKDTLMISRTPEVTCVVVDVSHEDPEVKFNWYVDGVEVHNAKTKPREEQYNSTYRVVSVLTVLHQDWLNGKEYKCKVSNKALPAPIEKTISKAKGQPREPQVYTLPPSRDELTKNQVSLTCLVKGFYPSDIAVEWESNGQPENNYKTTPPVLDSDGSFFLYSKLTVDKSRWQQGNVFSCSVMHEALHNHYTQKSLSLSPGKSRASTKGPSVFPLAPSSKSTSGGTAALGCLVKDYFPEPVTVSWNSGALTSGVHTFPAVLQSSGLYSLSSVVTVPSSSLGTQTYICNVNHKPSNTKVDKKV

SEQ ID NO: 65 - DNA, 1404 bp, Artificial Sequence
  X0148
  sig_peptide (1)...(60)
atggaagcaccagcgcagcttctcttcctcctgctactctggctcccagataccaccggtcagcccaaggccaaccccactgtcactctgttcccgccctcctctgaggagctccaagccaacaaggccacactagtgtgtctgatcagtgacttctacccgggagctgtgacagtggcctggaaggcagatggcagccccgtcaaggcgggagtggagaccaccaaaccctccaaacagagcaacaacaagtacgcggccagcagctacctgagcctgacgcccgagcagtggaagtcccacagaagctacagctgccaggtcacgcatgaagggagcaccgtggagaagacagtggcccctacagaatcctcacgtacggagcccaaatcttctgacaaaactcacacatgcccaccgtgcccatccggagcacctgaactcctgggtggaccgtcagtcttcctcttccccccaaaacccaaggacaccctcatgatctcccggacccctgaggtcacatgcgtggtggtggacgtgagccacgaagaccctgaggtcaagttcaactggtacgtggacggcgtggaggtgcataatgccaagacaaagccgcgggaggagcagtacaacagcacgtaccgtgtggtcagcgtcctcaccgtcctgcaccaggactggctgaatggcaaggagtacaagtgcaaggtctccaacaaagccctcccagcccccatcgagaaaaccatctccaaagccaaagggcagccccgagaaccacaggtgtacaccctgcccccatcccgggatgagctgaccaagaaccaggtcagcctgacctgcctggtcaaaggcttctatccaagcgacatcgccgtggagtgggagagcaatgggcagccggagaacaactacaagaccacgcctcccgtgctggactccgacggctccttcttcctctacagcaagctcaccgtggacaagagcaggtggcagcaggggaacgtcttctcatgctccgtgatgcatgaggctctgcacaaccactacacgcagaagagcctctccctgtctccgggtaaatctagacagcccaaggccaaccccactgtcactctgttcccgccctcctctgaggagctccaagccaacaaggccacactagtgtgtctgatcagtgacttctacccgggagctgtgacagtggcctggaaggcagatggcagccccgtcaaggcgggagtggagaccaccaaaccctccaaacagagcaacaacaagtacgcggccagcagctacctgagcctgacgcccgagcagtggaagtcccacagaagctacagctgccaggtcacgcatgaagggagcaccgtggagaagacagtggcccctacagaatcctca

SEQ ID NO: 66 - protein, 468 aa, Artificial Sequence
  X0148
  SIGNAL (1)...(20)
MEAPAQLLFLLLLWLPDTTGQPKANPTVTLFPPSSEELQANKATLVCLISDFYPGAVTVAWKADGSPVKAGVETTKPSKQSNNKYAASSYLSLTPEQWKSHRSYSCQVTHEGSTVEKTVAPTESSRTEPKSSDKTHTCPPCPSGAPELLGGPSVFLFPPKPKDTLMISRTPEVTCVVVDVSHEDPEVKFNWYVDGVEVHNAKTKPREEQYNSTYRVVSVLTVLHQDWLNGKEYKCKVSNKALPAPIEKTISKAKGQPREPQVYTLPPSRDELTKNQVSLTCLVKGFYPSDIAVEWESNGQPENNYKTTPPVLDSDGSFFLYSKLTVDKSRWQQGNVFSCSVMHEALHNHYTQKSLSLSPGKSRQPKANPTVTLFPPSSEELQANKATLVCLISDFYPGAVTVAWKADGSPVKAGVETTKPSKQSNNKYAASSYLSLTPEQWKSHRSYSCQVTHEGSTVEKTVAPTESS

SEQ ID NO: 67 - DNA, 1389 bp, Artificial Sequence
  X0167
  sig_peptide (1)...(60)
atggaagcaccagcgcagcttctcttcctcctgctactctggctcccagataccaccggttcgagcgcctccaccaagggcccatcggtcttccccctggcaccctcctccaagagcacctctgggggcacagcggccctgggctgcctggtcaaggactacttccccgagccggtgacggtgtcgtggaactcaggcgccctgaccagcggcgtgcacaccttcccggctgtcctacagtcctcaggactctactccctcagcagcgtggtgaccgtgccctccagcagcttgggcacccagacctacatctgcaacgtgaatcacaagcccagcaacaccaaggtggacaagaaagttcgtacggagcccaaatcttctgacaaaactcacacatgcccaccgtgcccatccggagcacctgaactcctgggtggaccgtcagtcttcctcttccccccaaaacccaaggacaccctcatgatctcccggacccctgaggtcacatgcgtggtggtggacgtgagccacgaagaccctgaggtcaagttcaactggtacgtggacggcgtggaggtgcataatgccaagacaaagccgcgggaggagcagtacaacagcacgtaccgtgtggtcagcgtcctcaccgtcctgcaccaggactggctgaatggcaaggagtacaagtgcaaggtctccaacaaagccctcccagcccccatcgagaaaaccatctccaaagccaaagggcagccccgagaaccacaggtgtacaccctgcccccatcccgggatgagctgaccaagaaccaggtcagcctgacctgcctggtcaaaggcttctatccaagcgacatcgccgtggagtgggagagcaatgggcagccggagaacaactacaagaccacgcctcccgtgctggactccgacggctccttcttcctctacagcaagctcaccgtggacaagagcaggtggcagcaggggaacgtcttctcatgctccgtgatgcatgaggctctgcacaaccactacacgcagaagagcctctccctgtctccgggtaaatctagaactgtggctgcaccatctgtcttcatcttcccgccatctgatgagcagttgaaatctggaactgcctctgttgtgtgcctgctgaataacttctatcccagagaggccaaagtacagtggaaggtggataacgccctccaatcgggtaactcccaggagagtgtcacagagcaggacagcaaggacagcacctacagcctcagcagcaccctgacgctgagcaaagcagactacgagaaacacaaagtctacgcctgcgaagtcacccatcagggcctgagctcgcccgtcacaaagagcttcaacaggggagag

SEQ ID NO: 68 - protein, 463 aa, Artificial Sequence
  X0167
  SIGNAL (1)...(20)
MEAPAQLLFLLLLWLPDTTGSSASTKGPSVFPLAPSSKSTSGGTAALGCLVKDYFPEPVTVSWNSGALTSGVHTFPAVLQSSGLYSLSSVVTVPSSSLGTQTYICNVNHKPSNTKVDKKVRTEPKSSDKTHTCPPCPSGAPELLGGPSVFLFPPKPKDTLMISRTPEVTCVVVDVSHEDPEVKFNWYVDGVEVHNAKTKPREEQYNSTYRVVSVLTVLHQDWLNGKEYKCKVSNKALPAPIEKTISKAKGQPREPQVYTLPPSRDELTKNQVSLTCLVKGFYPSDIAVEWESNGQPENNYKTTPPVLDSDGSFFLYSKLTVDKSRWQQGNVFSCSVMHEALHNHYTQKSLSLSPGKSRTVAAPSVFIFPPSDEQLKSGTASVVCLLNNFYPREAKVQWKVDNALQSGNSQESVTEQDSKDSTYSLSSTLTLSKADYEKHKVYACEVTHQGLSSPVTKSFNRGE

SEQ ID NO: 69 - DNA, 2199 bp, Artificial Sequence
  X0168
  sig_peptide (1)...(60)
atggaagcaccagcgcagcttctcttcctcctgctactctggctcccagataccaccggtactgtggctgcaccatctgtcttcatcttcccgccatctgatgagcagttgaaatctggaactgcctctgttgtgtgcctgctgaataacttctatcccagagaggccaaagtacagtggaaggtggataacgccctccaatcgggtaactcccaggagagtgtcacagagcaggacagcaaggacagcacctacagcctcagcagcaccctgacgctgagcaaagcagactacgagaaacacaaagtctacgcctgcgaagtcacccatcagggcctgagctcgcccgtcacaaagagcttcaacaggggagagcgtacggagcccaaatcttctgacaaaactcacacatgcccaccgtgcccatccggagcacctgaactcctgggtggaccgtcagtcttcctcttccccccaaaacccaaggacaccctcatgatctcccggacccctgaggtcacatgcgtggtggtggacgtgagccacgaagaccctgaggtcaagttcaactggtacgtggacggcgtggaggtgcataatgccaagacaaagccgcgggaggagcagtacaacagcacgtaccgtgtggtcagcgtcctcaccgtcctgcaccaggactggctgaatggcaaggagtacaagtgcaaggtctccaacaaagccctcccagcccccatcgagaaaaccatctccaaagccaaagggcagccccgagaaccacaggtgtacaccctgcccccatcccgggatgagctgaccaagaaccaggtcagcctgacctgcctggtcaaaggcttctatccaagcgacatcgccgtggagtgggagagcaatgggcagccggagaacaactacaagaccacgcctcccgtgctggactccgacggctccttcttcctctacagcaagctcaccgtggacaagagcaggtggcagcaggggaacgtcttctcatgctccgtgatgcatgaggctctgcacaaccactacacgcagaagagcctctccctgtctccgggtaaatctagagcctccaccaagggcccatcggtcttccccctggcaccctcctccaagagcacctctgggggcacagcggccctgggctgcctggtcaaggactacttccccgagccggtgacggtgtcgtggaactcaggcgccctgaccagcggcgtgcacaccttcccggctgtcctacagtcctcaggactctactccctcagcagcgtggtgaccgtgccctccagcagcttgggcacccagacctacatctgcaacgtgaatcacaagcccagcaacaccaaggtggacaagaaagttaactcattattcaaccaagaagttcaaattcccttgaccgaaagttacagcccgaattctcaggtgcagctgaaggagtcaggacctggcagcgtggcgccctcacagagcctgtccatcacatgcaccgtctcagggttctcattaaccggctatggtgtaaactgggttcgccagcctccaggaaagggtctggagtggctgggaatgatatggggtgatggaagcacagactataattcagctctcaaatccagactatcgatcaccaaggacaactccaagagccaagttttcttaaaaatgaacagtctgcaaactgatgacacagccagatactactgtgctcgggatggttatagtaactttcattactatgttatggactactggggtcaaggaacctcagtcaccgtctcctctgggggtggaggctctggtggcggtggatccggcggaggtgggtcgggtggcggcggatctgacattgtgctcacccaatctccagcttctttggctgtgtctctaggtcagagagccaccatctcctgcagagccagtgaaagtgttgaatattatgtcacaagtttaatgcagtggtaccaacagaaaccaggacagccacccaaactcctcatctctgctgctagcaacgtagaatctggggtccctgccaggtttagtggcagtgggtctgggacagactttagcctcaacatccatcctgtggaggaggatgatattgcaatgtatttctgtcagcaaagtaggaaggttccatggacgttcggtggaggcaccaagctggaaatcaag

SEQ ID NO: 70 - protein, 733 aa, Artificial Sequence
  X0168
  SIGNAL (1)...(20)
MEAPAQLLFLLLLWLPDTTGTVAAPSVFIFPPSDEQLKSGTASVVCLLNNFYPREAKVQWKVDNALQSGNSQESVTEQDSKDSTYSLSSTLTLSKADYEKHKVYACEVTHQGLSSPVTKSFNRGERTEPKSSDKTHTCPPCPSGAPELLGGPSVFLFPPKPKDTLMISRTPEVTCVVVDVSHEDPEVKFNWYVDGVEVHNAKTKPREEQYNSTYRVVSVLTVLHQDWLNGKEYKCKVSNKALPAPIEKTISKAKGQPREPQVYTLPPSRDELTKNQVSLTCLVKGFYPSDIAVEWESNGQPENNYKTTPPVLDSDGSFFLYSKLTVDKSRWQQGNVFSCSVMHEALHNHYTQKSLSLSPGKSRASTKGPSVFPLAPSSKSTSGGTAALGCLVKDYFPEPVTVSWNSGALTSGVHTFPAVLQSSGLYSLSSVVTVPSSSLGTQTYICNVNHKPSNTKVDKKVNSLFNQEVQIPLTESYSPNSQVQLKESGPGSVAPSQSLSITCTVSGFSLTGYGVNWVRQPPGKGLEWLGMIWGDGSTDYNSALKSRLSITKDNSKSQVFLKMNSLQTDDTARYYCARDGYSNFHYYVMDYWGQGTSVTVSSGGGGSGGGGSGGGGSGGGGSDIVLTQSPASLAVSLGQRATISCRASESVEYYVTSLMQWYQQKPGQPPKLLISAASNVESGVPARFSGSGSGTDFSLNIHPVEEDDIAMYFCQQSRKVPWTFGGGTKLEIK

SEQ ID NO: 71 - protein, 341 aa, Artificial Sequence
  X0113 (CkCH2CH3) mature protein without the signal peptide
TVAAPSVFIFPPSDEQLKSGTASVVCLLNNFYPREAKVQWKVDNALQSGNSQESVTEQDSKDSTYSLSSTLTLSKADYEKHKVYACEVTHQGLSSPVTKSFNRGERTEPKSSDKTHTCPPCPSGAPELLGGPSVFLFPPKPKDTLMISRTPEVTCVVVDVSHEDPEVKFNWYVDGVEVHNAKTKPREEQYNSTYRVVSVLTVLHQDWLNGKEYKCKVSNKALPAPIEKTISKAKGQPREPQVYTLPPSRDELTKNQVSLTCLVKGFYPSDIAVEWESNGQPENNYKTTPPVLDSDGSFFLYSKLTVDKSRWQQGNVFSCSVMHEALHNHYTQKSLSLSPGK

SEQ ID NO: 72 - protein, 341 aa, Artificial Sequence
  X0113 (CkCH2CH3) N29A mature protein without the signal peptide
TVAAPSVFIFPPSDEQLKSGTASVVCLLANFYPREAKVQWKVDNALQSGNSQESVTEQDSKDSTYSLSSTLTLSKADYEKHKVYACEVTHQGLSSPVTKSFNRGERTEPKSSDKTHTCPPCPSGAPELLGGPSVFLFPPKPKDTLMISRTPEVTCVVVDVSHEDPEVKFNWYVDGVEVHNAKTKPREEQYNSTYRVVSVLTVLHQDWLNGKEYKCKVSNKALPAPIEKTISKAKGQPREPQVYTLPPSRDELTKNQVSLTCLVKGFYPSDIAVEWESNGQPENNYKTTPPVLDSDGSFFLYSKLTVDKSRWQQGNVFSCSVMHEALHNHYTQKSLSLSPGK

SEQ ID NO: 73 - protein, 341 aa, Artificial Sequence
  X0113 (CkCH2CH3) N30A mature protein without the signal peptide
TVAAPSVFIFPPSDEQLKSGTASVVCLLNAFYPREAKVQWKVDNALQSGNSQESVTEQDSKDSTYSLSSTLTLSKADYEKHKVYACEVTHQGLSSPVTKSFNRGERTEPKSSDKTHTCPPCPSGAPELLGGPSVFLFPPKPKDTLMISRTPEVTCVVVDVSHEDPEVKFNWYVDGVEVHNAKTKPREEQYNSTYRVVSVLTVLHQDWLNGKEYKCKVSNKALPAPIEKTISKAKGQPREPQVYTLPPSRDELTKNQVSLTCLVKGFYPSDIAVEWESNGQPENNYKTTPPVLDSDGSFFLYSKLTVDKSRWQQGNVFSCSVMHEALHNHYTQKSLSLSPGK

SEQ ID NO: 74 - protein, 341 aa, Artificial Sequence
  X0113 (CkCH2CH3) Q52A mature protein without the signal peptide
TVAAPSVFIFPPSDEQLKSGTASVVCLLNNFYPREAKVQWKVDNALQSGNSAESVTEQDSKDSTYSLSSTLTLSKADYEKHKVYACEVTHQGLSSPVTKSFNRGERTEPKSSDKTHTCPPCPSGAPELLGGPSVFLFPPKPKDTLMISRTPEVTCVVVDVSHEDPEVKFNWYVDGVEVHNAKTKPREEQYNSTYRVVSVLTVLHQDWLNGKEYKCKVSNKALPAPIEKTISKAKGQPREPQVYTLPPSRDELTKNQVSLTCLVKGFYPSDIAVEWESNGQPENNYKTTPPVLDSDGSFFLYSKLTVDKSRWQQGNVFSCSVMHEALHNHYTQKSLSLSPGK

SEQ ID NO: 75 - protein, 341 aa, Artificial Sequence
  X0113 (CkCH2CH3) V55A mature protein without the signal peptide
TVAAPSVFIFPPSDEQLKSGTASVVCLLNNFYPREAKVQWKVDNALQSGNSQESATEQDSKDSTYSLSSTLTLSKADYEKHKVYACEVTHQGLSSPVTKSFNRGERTEPKSSDKTHTCPPCPSGAPELLGGPSVFLFPPKPKDTLMISRTPEVTCVVVDVSHEDPEVKFNWYVDGVEVHNAKTKPREEQYNSTYRVVSVLTVLHQDWLNGKEYKCKVSNKALPAPIEKTISKAKGQPREPQVYTLPPSRDELTKNQVSLTCLVKGFYPSDIAVEWESNGQPENNYKTTPPVLDSDGSFFLYSKLTVDKSRWQQGNVFSCSVMHEALHNHYTQKSLSLSPGK

SEQ ID NO: 76 - protein, 341 aa, Artificial Sequence
  X0113 (CkCH2CH3) T56A mature protein without the signal peptide
TVAAPSVFIFPPSDEQLKSGTASVVCLLNNFYPREAKVQWKVDNALQSGNSQESVAEQDSKDSTYSLSSTLTLSKADYEKHKVYACEVTHQGLSSPVTKSFNRGERTEPKSSDKTHTCPPCPSGAPELLGGPSVFLFPPKPKDTLMISRTPEVTCVVVDVSHEDPEVKFNWYVDGVEVHNAKTKPREEQYNSTYRVVSVLTVLHQDWLNGKEYKCKVSNKALPAPIEKTISKAKGQPREPQVYTLPPSRDELTKNQVSLTCLVKGFYPSDIAVEWESNGQPENNYKTTPPVLDSDGSFFLYSKLTVDKSRWQQGNVFSCSVMHEALHNHYTQKSLSLSPGK

SEQ ID NO: 77 - protein, 341 aa, Artificial Sequence
  X0113 (CkCH2CH3) S68A mature protein without the signal peptide
TVAAPSVFIFPPSDEQLKSGTASVVCLLNNFYPREAKVQWKVDNALQSGNSQESVTEQDSKDSTYSLASTLTLSKADYEKHKVYACEVTHQGLSSPVTKSFNRGERTEPKSSDKTHTCPPCPSGAPELLGGPSVFLFPPKPKDTLMISRTPEVTCVVVDVSHEDPEVKFNWYVDGVEVHNAKTKPREEQYNSTYRVVSVLTVLHQDWLNGKEYKCKVSNKALPAPIEKTISKAKGQPREPQVYTLPPSRDELTKNQVSLTCLVKGFYPSDIAVEWESNGQPENNYKTTPPVLDSDGSFFLYSKLTVDKSRWQQGNVFSCSVMHEALHNHYTQKSLSLSPGK

SEQ ID NO: 78 - protein, 341 aa, Artificial Sequence
  X0113 (CkCH2CH3) T70A mature protein without the signal peptide
TVAAPSVFIFPPSDEQLKSGTASVVCLLNNFYPREAKVQWKVDNALQSGNSQESVTEQDSKDSTYSLSSALTLSKADYEKHKVYACEVTHQGLSSPVTKSFNRGERTEPKSSDKTHTCPPCPSGAPELLGGPSVFLFPPKPKDTLMISRTPEVTCVVVDVSHEDPEVKFNWYVDGVEVHNAKTKPREEQYNSTYRVVSVLTVLHQDWLNGKEYKCKVSNKALPAPIEKTISKAKGQPREPQVYTLPPSRDELTKNQVSLTCLVKGFYPSDIAVEWESNGQPENNYKTTPPVLDSDGSFFLYSKLTVDKSRWQQGNVFSCSVMHEALHNHYTQKSLSLSPGK

SEQ ID NO: 79 - protein, 341 aa, Artificial Sequence
  X0113 (CkCH2CH3) V55A N29A mature protein without the signal peptide
TVAAPSVFIFPPSDEQLKSGTASVVCLLANFYPREAKVQWKVDNALQSGNSQESATEQDSKDSTYSLSSTLTLSKADYEKHKVYACEVTHQGLSSPVTKSFNRGERTEPKSSDKTHTCPPCPSGAPELLGGPSVFLFPPKPKDTLMISRTPEVTCVVVDVSHEDPEVKFNWYVDGVEVHNAKTKPREEQYNSTYRVVSVLTVLHQDWLNGKEYKCKVSNKALPAPIEKTISKAKGQPREPQVYTLPPSRDELTKNQVSLTCLVKGFYPSDIAVEWESNGQPENNYKTTPPVLDSDGSFFLYSKLTVDKSRWQQGNVFSCSVMHEALHNHYTQKSLSLSPGK

SEQ ID NO: 80 - protein, 341 aa, Artificial Sequence
  X0113 (CkCH2CH3) V55A N30A mature protein without the signal peptide
TVAAPSVFIFPPSDEQLKSGTASVVCLLNAFYPREAKVQWKVDNALQSGNSQESATEQDSKDSTYSLSSTLTLSKADYEKHKVYACEVTHQGLSSPVTKSFNRGERTEPKSSDKTHTCPPCPSGAPELLGGPSVFLFPPKPKDTLMISRTPEVTCVVVDVSHEDPEVKFNWYVDGVEVHNAKTKPREEQYNSTYRVVSVLTVLHQDWLNGKEYKCKVSNKALPAPIEKTISKAKGQPREPQVYTLPPSRDELTKNQVSLTCLVKGFYPSDIAVEWESNGQPENNYKTTPPVLDSDGSFFLYSKLTVDKSRWQQGNVFSCSVMHEALHNHYTQKSLSLSPGK

SEQ ID NO: 81 - protein, 341 aa, Artificial Sequence
  X0113 (CkCH2CH3) V55A Q52A mature protein without the signal peptide
TVAAPSVFIFPPSDEQLKSGTASVVCLLNNFYPREAKVQWKVDNALQSGNSAESATEQDSKDSTYSLSSTLTLSKADYEKHKVYACEVTHQGLSSPVTKSFNRGERTEPKSSDKTHTCPPCPSGAPELLGGPSVFLFPPKPKDTLMISRTPEVTCVVVDVSHEDPEVKFNWYVDGVEVHNAKTKPREEQYNSTYRVVSVLTVLHQDWLNGKEYKCKVSNKALPAPIEKTISKAKGQPREPQVYTLPPSRDELTKNQVSLTCLVKGFYPSDIAVEWESNGQPENNYKTTPPVLDSDGSFFLYSKLTVDKSRWQQGNVFSCSVMHEALHNHYTQKSLSLSPGK

SEQ ID NO: 82 - protein, 341 aa, Artificial Sequence
  X0113 (CkCH2CH3) V55A T56A mature protein without the signal peptide
TVAAPSVFIFPPSDEQLKSGTASVVCLLNNFYPREAKVQWKVDNALQSGNSQESAAEQDSKDSTYSLSSTLTLSKADYEKHKVYACEVTHQGLSSPVTKSFNRGERTEPKSSDKTHTCPPCPSGAPELLGGPSVFLFPPKPKDTLMISRTPEVTCVVVDVSHEDPEVKFNWYVDGVEVHNAKTKPREEQYNSTYRVVSVLTVLHQDWLNGKEYKCKVSNKALPAPIEKTISKAKGQPREPQVYTLPPSRDELTKNQVSLTCLVKGFYPSDIAVEWESNGQPENNYKTTPPVLDSDGSFFLYSKLTVDKSRWQQGNVFSCSVMHEALHNHYTQKSLSLSPGK

SEQ ID NO: 83 - protein, 341 aa, Artificial Sequence
  X0113 (CkCH2CH3) V55A S68A mature protein without the signal peptide
TVAAPSVFIFPPSDEQLKSGTASVVCLLNNFYPREAKVQWKVDNALQSGNSQESATEQDSKDSTYSLASTLTLSKADYEKHKVYACEVTHQGLSSPVTKSFNRGERTEPKSSDKTHTCPPCPSGAPELLGGPSVFLFPPKPKDTLMISRTPEVTCVVVDVSHEDPEVKFNWYVDGVEVHNAKTKPREEQYNSTYRVVSVLTVLHQDWLNGKEYKCKVSNKALPAPIEKTISKAKGQPREPQVYTLPPSRDELTKNQVSLTCLVKGFYPSDIAVEWESNGQPENNYKTTPPVLDSDGSFFLYSKLTVDKSRWQQGNVFSCSVMHEALHNHYTQKSLSLSPGK

SEQ ID NO: 84 - protein, 341 aa, Artificial Sequence
  X0113 (CkCH2CH3) V55A T70A mature protein without the signal peptide
TVAAPSVFIFPPSDEQLKSGTASVVCLLNNFYPREAKVQWKVDNALQSGNSQESATEQDSKDSTYSLSSALTLSKADYEKHKVYACEVTHQGLSSPVTKSFNRGERTEPKSSDKTHTCPPCPSGAPELLGGPSVFLFPPKPKDTLMISRTPEVTCVVVDVSHEDPEVKFNWYVDGVEVHNAKTKPREEQYNSTYRVVSVLTVLHQDWLNGKEYKCKVSNKALPAPIEKTISKAKGQPREPQVYTLPPSRDELTKNQVSLTCLVKGFYPSDIAVEWESNGQPENNYKTTPPVLDSDGSFFLYSKLTVDKSRWQQGNVFSCSVMHEALHNHYTQKSLSLSPGK

SEQ ID NO: 85 - protein, 341 aa, Artificial Sequence
  X0113 (CkCH2CH3) V55A N29A N30A mature protein without the signal peptide
TVAAPSVFIFPPSDEQLKSGTASVVCLLAAFYPREAKVQWKVDNALQSGNSQESATEQDSKDSTYSLSSTLTLSKADYEKHKVYACEVTHQGLSSPVTKSFNRGERTEPKSSDKTHTCPPCPSGAPELLGGPSVFLFPPKPKDTLMISRTPEVTCVVVDVSHEDPEVKFNWYVDGVEVHNAKTKPREEQYNSTYRVVSVLTVLHQDWLNGKEYKCKVSNKALPAPIEKTISKAKGQPREPQVYTLPPSRDELTKNQVSLTCLVKGFYPSDIAVEWESNGQPENNYKTTPPVLDSDGSFFLYSKLTVDKSRWQQGNVFSCSVMHEALHNHYTQKSLSLSPGK

SEQ ID NO: 86 - protein, 341 aa, Artificial Sequence
  X0113 (CkCH2CH3) V55A N29A S68A mature protein without the signal peptide
TVAAPSVFIFPPSDEQLKSGTASVVCLLANFYPREAKVQWKVDNALQSGNSQESATEQDSKDSTYSLASTLTLSKADYEKHKVYACEVTHQGLSSPVTKSFNRGERTEPKSSDKTHTCPPCPSGAPELLGGPSVFLFPPKPKDTLMISRTPEVTCVVVDVSHEDPEVKFNWYVDGVEVHNAKTKPREEQYNSTYRVVSVLTVLHQDWLNGKEYKCKVSNKALPAPIEKTISKAKGQPREPQVYTLPPSRDELTKNQVSLTCLVKGFYPSDIAVEWESNGQPENNYKTTPPVLDSDGSFFLYSKLTVDKSRWQQGNVFSCSVMHEALHNHYTQKSLSLSPGK

SEQ ID NO: 87 - protein, 341 aa, Artificial Sequence
  X0113 (CkCH2CH3) V55A S68A T70A mature protein without the signal peptide
TVAAPSVFIFPPSDEQLKSGTASVVCLLNNFYPREAKVQWKVDNALQSGNSQESATEQDSKDSTYSLASALTLSKADYEKHKVYACEVTHQGLSSPVTKSFNRGERTEPKSSDKTHTCPPCPSGAPELLGGPSVFLFPPKPKDTLMISRTPEVTCVVVDVSHEDPEVKFNWYVDGVEVHNAKTKPREEQYNSTYRVVSVLTVLHQDWLNGKEYKCKVSNKALPAPIEKTISKAKGQPREPQVYTLPPSRDELTKNQVSLTCLVKGFYPSDIAVEWESNGQPENNYKTTPPVLDSDGSFFLYSKLTVDKSRWQQGNVFSCSVMHEALHNHYTQKSLSLSPGK

SEQ ID NO: 88 - protein, 341 aa, Artificial Sequence
  X0113 (CkCH2CH3) V55A Q52A S68A mature protein without the signal peptide
TVAAPSVFIFPPSDEQLKSGTASVVCLLNNFYPREAKVQWKVDNALQSGNSAESATEQDSKDSTYSLASTLTLSKADYEKHKVYACEVTHQGLSSPVTKSFNRGERTEPKSSDKTHTCPPCPSGAPELLGGPSVFLFPPKPKDTLMISRTPEVTCVVVDVSHEDPEVKFNWYVDGVEVHNAKTKPREEQYNSTYRVVSVLTVLHQDWLNGKEYKCKVSNKALPAPIEKTISKAKGQPREPQVYTLPPSRDELTKNQVSLTCLVKGFYPSDIAVEWESNGQPENNYKTTPPVLDSDGSFFLYSKLTVDKSRWQQGNVFSCSVMHEALHNHYTQKSLSLSPGK

SEQ ID NO: 89 - protein, 341 aa, Artificial Sequence
  X0113 (CkCH2CH3) N29R V55A T70A mature protein without the signal peptide
TVAAPSVFIFPPSDEQLKSGTASVVCLLRNFYPREAKVQWKVDNALQSGNSQESATEQDSKDSTYSLSSALTLSKADYEKHKVYACEVTHQGLSSPVTKSFNRGERTEPKSSDKTHTCPPCPSGAPELLGGPSVFLFPPKPKDTLMISRTPEVTCVVVDVSHEDPEVKFNWYVDGVEVHNAKTKPREEQYNSTYRVVSVLTVLHQDWLNGKEYKCKVSNKALPAPIEKTISKAKGQPREPQVYTLPPSRDELTKNQVSLTCLVKGFYPSDIAVEWESNGQPENNYKTTPPVLDSDGSFFLYSKLTVDKSRWQQGNVFSCSVMHEALHNHYTQKSLSLSPGK

SEQ ID NO: 90 - protein, 341 aa, Artificial Sequence
  X0113 (CkCH2CH3) N29K V55A T70A  mature protein without the signal peptide
TVAAPSVFIFPPSDEQLKSGTASVVCLLKNFYPREAKVQWKVDNALQSGNSQESATEQDSKDSTYSLSSALTLSKADYEKHKVYACEVTHQGLSSPVTKSFNRGERTEPKSSDKTHTCPPCPSGAPELLGGPSVFLFPPKPKDTLMISRTPEVTCVVVDVSHEDPEVKFNWYVDGVEVHNAKTKPREEQYNSTYRVVSVLTVLHQDWLNGKEYKCKVSNKALPAPIEKTISKAKGQPREPQVYTLPPSRDELTKNQVSLTCLVKGFYPSDIAVEWESNGQPENNYKTTPPVLDSDGSFFLYSKLTVDKSRWQQGNVFSCSVMHEALHNHYTQKSLSLSPGK

SEQ ID NO: 91 - protein, 341 aa, Artificial Sequence
  X0113 (CkCH2CH3) N29W V55A T70A mature protein without the signal peptide
TVAAPSVFIFPPSDEQLKSGTASVVCLLWNFYPREAKVQWKVDNALQSGNSQESATEQDSKDSTYSLSSALTLSKADYEKHKVYACEVTHQGLSSPVTKSFNRGERTEPKSSDKTHTCPPCPSGAPELLGGPSVFLFPPKPKDTLMISRTPEVTCVVVDVSHEDPEVKFNWYVDGVEVHNAKTKPREEQYNSTYRVVSVLTVLHQDWLNGKEYKCKVSNKALPAPIEKTISKAKGQPREPQVYTLPPSRDELTKNQVSLTCLVKGFYPSDIAVEWESNGQPENNYKTTPPVLDSDGSFFLYSKLTVDKSRWQQGNVFSCSVMHEALHNHYTQKSLSLSPGK

SEQ ID NO: 92 - protein, 341 aa, Artificial Sequence
  X0113 (CkCH2CH3) N29Y V55A T70A mature protein without the signal peptide
TVAAPSVFIFPPSDEQLKSGTASVVCLLYNFYPREAKVQWKVDNALQSGNSQESATEQDSKDSTYSLSSALTLSKADYEKHKVYACEVTHQGLSSPVTKSFNRGERTEPKSSDKTHTCPPCPSGAPELLGGPSVFLFPPKPKDTLMISRTPEVTCVVVDVSHEDPEVKFNWYVDGVEVHNAKTKPREEQYNSTYRVVSVLTVLHQDWLNGKEYKCKVSNKALPAPIEKTISKAKGQPREPQVYTLPPSRDELTKNQVSLTCLVKGFYPSDIAVEWESNGQPENNYKTTPPVLDSDGSFFLYSKLTVDKSRWQQGNVFSCSVMHEALHNHYTQKSLSLSPGK

SEQ ID NO: 93 - protein, 341 aa, Artificial Sequence
  X0113 (CkCH2CH3) S8K V55A mature protein without the signal peptide
TVAAPSVFIFPPSDEQLKSGTASVVCLLNNFYPREAKVQWKVDNALQSGNSQESATEQDSKDSTYSLKSTLTLSKADYEKHKVYACEVTHQGLSSPVTKSFNRGERTEPKSSDKTHTCPPCPSGAPELLGGPSVFLFPPKPKDTLMISRTPEVTCVVVDVSHEDPEVKFNWYVDGVEVHNAKTKPREEQYNSTYRVVSVLTVLHQDWLNGKEYKCKVSNKALPAPIEKTISKAKGQPREPQVYTLPPSRDELTKNQVSLTCLVKGFYPSDIAVEWESNGQPENNYKTTPPVLDSDGSFFLYSKLTVDKSRWQQGNVFSCSVMHEALHNHYTQKSLSLSPGK

SEQ ID NO: 94 - protein, 341 aa, Artificial Sequence
  X0113 (CkCH2CH3) S68E V55A mature protein without the signal peptide
TVAAPSVFIFPPSDEQLKSGTASVVCLLNNFYPREAKVQWKVDNALQSGNSQESATEQDSKDSTYSLESTLTLSKADYEKHKVYACEVTHQGLSSPVTKSFNRGERTEPKSSDKTHTCPPCPSGAPELLGGPSVFLFPPKPKDTLMISRTPEVTCVVVDVSHEDPEVKFNWYVDGVEVHNAKTKPREEQYNSTYRVVSVLTVLHQDWLNGKEYKCKVSNKALPAPIEKTISKAKGQPREPQVYTLPPSRDELTKNQVSLTCLVKGFYPSDIAVEWESNGQPENNYKTTPPVLDSDGSFFLYSKLTVDKSRWQQGNVFSCSVMHEALHNHYTQKSLSLSPGK

SEQ ID NO: 95 - protein, 341 aa, Artificial Sequence
  X0113 (CkCH2CH3) S68Q V55A mature protein without the signal peptide
TVAAPSVFIFPPSDEQLKSGTASVVCLLNNFYPREAKVQWKVDNALQSGNSQESATEQDSKDSTYSLQSTLTLSKADYEKHKVYACEVTHQGLSSPVTKSFNRGERTEPKSSDKTHTCPPCPSGAPELLGGPSVFLFPPKPKDTLMISRTPEVTCVVVDVSHEDPEVKFNWYVDGVEVHNAKTKPREEQYNSTYRVVSVLTVLHQDWLNGKEYKCKVSNKALPAPIEKTISKAKGQPREPQVYTLPPSRDELTKNQVSLTCLVKGFYPSDIAVEWESNGQPENNYKTTPPVLDSDGSFFLYSKLTVDKSRWQQGNVFSCSVMHEALHNHYTQKSLSLSPGK

SEQ ID NO: 96 - protein, 341 aa, Artificial Sequence
  X0113 (CkCH2CH3) T70E V55A mature protein without the signal peptide
TVAAPSVFIFPPSDEQLKSGTASVVCLLNNFYPREAKVQWKVDNALQSGNSQESATEQDSKDSTYSLSSELTLSKADYEKHKVYACEVTHQGLSSPVTKSFNRGERTEPKSSDKTHTCPPCPSGAPELLGGPSVFLFPPKPKDTLMISRTPEVTCVVVDVSHEDPEVKFNWYVDGVEVHNAKTKPREEQYNSTYRVVSVLTVLHQDWLNGKEYKCKVSNKALPAPIEKTISKAKGQPREPQVYTLPPSRDELTKNQVSLTCLVKGFYPSDIAVEWESNGQPENNYKTTPPVLDSDGSFFLYSKLTVDKSRWQQGNVFSCSVMHEALHNHYTQKSLSLSPGK

SEQ ID NO: 97 - protein, 341 aa, Artificial Sequence
  X0113 (CkCH2CH3) Q52L N29A N30A mature protein without the signal peptide
TVAAPSVFIFPPSDEQLKSGTASVVCLLAAFYPREAKVQWKVDNALQSGNSLESVTEQDSKDSTYSLSSTLTLSKADYEKHKVYACEVTHQGLSSPVTKSFNRGERTEPKSSDKTHTCPPCPSGAPELLGGPSVFLFPPKPKDTLMISRTPEVTCVVVDVSHEDPEVKFNWYVDGVEVHNAKTKPREEQYNSTYRVVSVLTVLHQDWLNGKEYKCKVSNKALPAPIEKTISKAKGQPREPQVYTLPPSRDELTKNQVSLTCLVKGFYPSDIAVEWESNGQPENNYKTTPPVLDSDGSFFLYSKLTVDKSRWQQGNVFSCSVMHEALHNHYTQKSLSLSPGK

SEQ ID NO: 98 - protein, 341 aa, Artificial Sequence
  X0113 (CkCH2CH3) N30R V55A T70A mature protein without the signal peptide
TVAAPSVFIFPPSDEQLKSGTASVVCLLNRFYPREAKVQWKVDNALQSGNSQESATEQDSKDSTYSLSSALTLSKADYEKHKVYACEVTHQGLSSPVTKSFNRGERTEPKSSDKTHTCPPCPSGAPELLGGPSVFLFPPKPKDTLMISRTPEVTCVVVDVSHEDPEVKFNWYVDGVEVHNAKTKPREEQYNSTYRVVSVLTVLHQDWLNGKEYKCKVSNKALPAPIEKTISKAKGQPREPQVYTLPPSRDELTKNQVSLTCLVKGFYPSDIAVEWESNGQPENNYKTTPPVLDSDGSFFLYSKLTVDKSRWQQGNVFSCSVMHEALHNHYTQKSLSLSPGK

SEQ ID NO: 99 - protein, 341 aa, Artificial Sequence
  X0113 (CkCH2CH3) N30K V55A T70A mature protein without the signal peptide
TVAAPSVFIFPPSDEQLKSGTASVVCLLNKFYPREAKVQWKVDNALQSGNSQESATEQDSKDSTYSLSSALTLSKADYEKHKVYACEVTHQGLSSPVTKSFNRGERTEPKSSDKTHTCPPCPSGAPELLGGPSVFLFPPKPKDTLMISRTPEVTCVVVDVSHEDPEVKFNWYVDGVEVHNAKTKPREEQYNSTYRVVSVLTVLHQDWLNGKEYKCKVSNKALPAPIEKTISKAKGQPREPQVYTLPPSRDELTKNQVSLTCLVKGFYPSDIAVEWESNGQPENNYKTTPPVLDSDGSFFLYSKLTVDKSRWQQGNVFSCSVMHEALHNHYTQKSLSLSPGK

SEQ ID NO: 100 - protein, 341 aa, Artificial Sequence
  X0113 (CkCH2CH3) N30W V55A T70A mature protein without the signal peptide
TVAAPSVFIFPPSDEQLKSGTASVVCLLNWFYPREAKVQWKVDNALQSGNSQESATEQDSKDSTYSLSSALTLSKADYEKHKVYACEVTHQGLSSPVTKSFNRGERTEPKSSDKTHTCPPCPSGAPELLGGPSVFLFPPKPKDTLMISRTPEVTCVVVDVSHEDPEVKFNWYVDGVEVHNAKTKPREEQYNSTYRVVSVLTVLHQDWLNGKEYKCKVSNKALPAPIEKTISKAKGQPREPQVYTLPPSRDELTKNQVSLTCLVKGFYPSDIAVEWESNGQPENNYKTTPPVLDSDGSFFLYSKLTVDKSRWQQGNVFSCSVMHEALHNHYTQKSLSLSPGK

SEQ ID NO: 101 - protein, 341 aa, Artificial Sequence
  X0113 (CkCH2CH3) N30E V55A T70A mature protein without the signal peptide
TVAAPSVFIFPPSDEQLKSGTASVVCLLNEFYPREAKVQWKVDNALQSGNSQESATEQDSKDSTYSLSSALTLSKADYEKHKVYACEVTHQGLSSPVTKSFNRGERTEPKSSDKTHTCPPCPSGAPELLGGPSVFLFPPKPKDTLMISRTPEVTCVVVDVSHEDPEVKFNWYVDGVEVHNAKTKPREEQYNSTYRVVSVLTVLHQDWLNGKEYKCKVSNKALPAPIEKTISKAKGQPREPQVYTLPPSRDELTKNQVSLTCLVKGFYPSDIAVEWESNGQPENNYKTTPPVLDSDGSFFLYSKLTVDKSRWQQGNVFSCSVMHEALHNHYTQKSLSLSPGK

SEQ ID NO: 102 - protein, 341 aa, Artificial Sequence
  X0113 (CkCH2CH3) N30G V55A T70A mature protein without the signal peptide
TVAAPSVFIFPPSDEQLKSGTASVVCLLNGFYPREAKVQWKVDNALQSGNSQESATEQDSKDSTYSLSSALTLSKADYEKHKVYACEVTHQGLSSPVTKSFNRGERTEPKSSDKTHTCPPCPSGAPELLGGPSVFLFPPKPKDTLMISRTPEVTCVVVDVSHEDPEVKFNWYVDGVEVHNAKTKPREEQYNSTYRVVSVLTVLHQDWLNGKEYKCKVSNKALPAPIEKTISKAKGQPREPQVYTLPPSRDELTKNQVSLTCLVKGFYPSDIAVEWESNGQPENNYKTTPPVLDSDGSFFLYSKLTVDKSRWQQGNVFSCSVMHEALHNHYTQKSLSLSPGK

SEQ ID NO: 103 - protein, 341 aa, Artificial Sequence
  X0113 (CkCH2CH3) V55R N29A N30A mature protein without the signal peptide
TVAAPSVFIFPPSDEQLKSGTASVVCLLAAFYPREAKVQWKVDNALQSGNSQESRTEQDSKDSTYSLSSTLTLSKADYEKHKVYACEVTHQGLSSPVTKSFNRGERTEPKSSDKTHTCPPCPSGAPELLGGPSVFLFPPKPKDTLMISRTPEVTCVVVDVSHEDPEVKFNWYVDGVEVHNAKTKPREEQYNSTYRVVSVLTVLHQDWLNGKEYKCKVSNKALPAPIEKTISKAKGQPREPQVYTLPPSRDELTKNQVSLTCLVKGFYPSDIAVEWESNGQPENNYKTTPPVLDSDGSFFLYSKLTVDKSRWQQGNVFSCSVMHEALHNHYTQKSLSLSPGK

SEQ ID NO: 104 - protein, 341 aa, Artificial Sequence
  X0113 (CkCH2CH3) V55W N29A N30Amature protein without the signal peptide
TVAAPSVFIFPPSDEQLKSGTASVVCLLAAFYPREAKVQWKVDNALQSGNSQESWTEQDSKDSTYSLSSTLTLSKADYEKHKVYACEVTHQGLSSPVTKSFNRGERTEPKSSDKTHTCPPCPSGAPELLGGPSVFLFPPKPKDTLMISRTPEVTCVVVDVSHEDPEVKFNWYVDGVEVHNAKTKPREEQYNSTYRVVSVLTVLHQDWLNGKEYKCKVSNKALPAPIEKTISKAKGQPREPQVYTLPPSRDELTKNQVSLTCLVKGFYPSDIAVEWESNGQPENNYKTTPPVLDSDGSFFLYSKLTVDKSRWQQGNVFSCSVMHEALHNHYTQKSLSLSPGK

SEQ ID NO: 105 - protein, 341 aa, Artificial Sequence
  X0113 (CkCH2CH3) V55E N29A N30A mature protein without the signal peptide
TVAAPSVFIFPPSDEQLKSGTASVVCLLAAFYPREAKVQWKVDNALQSGNSQESETEQDSKDSTYSLSSTLTLSKADYEKHKVYACEVTHQGLSSPVTKSFNRGERTEPKSSDKTHTCPPCPSGAPELLGGPSVFLFPPKPKDTLMISRTPEVTCVVVDVSHEDPEVKFNWYVDGVEVHNAKTKPREEQYNSTYRVVSVLTVLHQDWLNGKEYKCKVSNKALPAPIEKTISKAKGQPREPQVYTLPPSRDELTKNQVSLTCLVKGFYPSDIAVEWESNGQPENNYKTTPPVLDSDGSFFLYSKLTVDKSRWQQGNVFSCSVMHEALHNHYTQKSLSLSPGK

SEQ ID NO: 106 - protein, 121 aa, Artificial Sequence
  VH of 2E12 scFv
QVQLKESGPGSVAPSQSLSITCTVSGFSLTGYGVNWVRQPPGKGLEWLGMIWGDGSTDYNSALKSRLSITKDNSKSQVFLKMNSLQTDDTARYYCARDGYSNFHYYVMDYWGQGTSVTVSS

SEQ ID NO: 107 - protein, 111 aa, Artificial Sequence
  VL of 2E12 scFv
DIVLTQSPASLAVSLGQRATISCRASESVEYYVTSLMQWYQQKPGQPPKLLISAASNVESGVPARFSGSGSGTDFSLNIHPVEEDDIAMYFCQQSRKVPWTFGGGTKLEIK

SEQ ID NO: 108 - protein, 20 aa, Artificial Sequence
  Linker of 2E12 scFv
GGGGSGGGGSGGGGSGGGGS

SEQ ID NO: 109 - protein, 252 aa, Artificial Sequence
  full length 2E12 scFv
QVQLKESGPGSVAPSQSLSITCTVSGFSLTGYGVNWVRQPPGKGLEWLGMIWGDGSTDYNSALKSRLSITKDNSKSQVFLKMNSLQTDDTARYYCARDGYSNFHYYVMDYWGQGTSVTVSSGGGGSGGGGSGGGGSGGGGSDIVLTQSPASLAVSLGQRATISCRASESVEYYVTSLMQWYQQKPGQPPKLLISAASNVESGVPARFSGSGSGTDFSLNIHPVEEDDIAMYFCQQSRKVPWTFGGGTKLEIK

SEQ ID NO: 110 - protein, 22 aa, Artificial Sequence
  Signal peptide of 2E12 scFv
MDFQVQIFSFLLISASVIMSRG

SEQ ID NO: 111 - protein, 20 aa, Artificial Sequence
  Signal peptide in various signle chain fusion proteins (X01xx)
MEAPAQLLFLLLLWLPDTTG

SEQ ID NO: 112 - protein, 107 aa, Homo sapiens [sequence omitted]

SEQ ID NO: 113 - protein, 106 aa, Homo sapiens
GQPKANPTVTLFPPSSEELQANKATLVCLISDFYPGAVTVAWKADGSPVKAGVETTKPSKQSNNKYAASSYLSLTPEQWKSHRSYSCQVTHEGSTVEKTVAPTECS

SEQ ID NO: 114 - protein, 98 aa, Homo sapiens
ASTKGPSVFPLAPSSKSTSGGTAALGCLVKDYFPEPVTVSWNSGALTSGVHTFPAVLQSSGLYSLSSVVTVPSSSLGTQTYICNVNHKPSNTKVDKKV

SEQ ID NO: 115 - protein, 110 aa, Homo sapiens
APELLGGPSVFLFPPKPKDTLMISRTPEVTCVVVDVSHEDPEVKFNWYVDGVEVHNAKTKPREEQYNSTYRVVSVLTVLHQDWLNGKEYKCKVSNKALPAPIEKTISKAK

SEQ ID NO: 116 - protein, 107 aa, Homo sapiens
GQPREPQVYTLPPSRDELTKNQVSLTCLVKGFYPSDIAVEWESNGQPENNYKTTPPVLDSDGSFFLYSKLTVDKSRWQQGNVFSCSVMHEALHNHYTQKSLSLSPGK

SEQ ID NO: 117 - protein, 341 aa, Artificial Sequence
  X0113 (CkCH2CH3) Q52R mature protein without the signal peptide
TVAAPSVFIFPPSDEQLKSGTASVVCLLNNFYPREAKVQWKVDNALQSGNSWESVTEQDSKDSTYSLSSTLTLSKADYEKHKVYACEVTHQGLSSPVTKSFNRGERTEPKSSDKTHTCPPCPSGAPELLGGPSVFLFPPKPKDTLMISRTPEVTCVVVDVSHEDPEVKFNWYVDGVEVHNAKTKPREEQYNSTYRVVSVLTVLHQDWLNGKEYKCKVSNKALPAPIEKTISKAKGQPREPQVYTLPPSRDELTKNQVSLTCLVKGFYPSDIAVEWESNGQPENNYKTTPPVLDSDGSFFLYSKLTVDKSRWQQGNVFSCSVMHEALHNHYTQKSLSLSPGK

SEQ ID NO: 118 - protein, 341 aa, Artificial Sequence; identical to SEQ ID NO: 117
  X0113 (CkCH2CH3) Q52W mature protein without the signal peptide

SEQ ID NO: 119 - protein, 341 aa, Artificial Sequence
  X0113 (CkCH2CH3) T56R mature protein without the signal peptide
TVAAPSVFIFPPSDEQLKSGTASVVCLLNNFYPREAKVQWKVDNALQSGNSQESVREQDSKDSTYSLSSTLTLSKADYEKHKVYACEVTHQGLSSPVTKSFNRGERTEPKSSDKTHTCPPCPSGAPELLGGPSVFLFPPKPKDTLMISRTPEVTCVVVDVSHEDPEVKFNWYVDGVEVHNAKTKPREEQYNSTYRVVSVLTVLHQDWLNGKEYKCKVSNKALPAPIEKTISKAKGQPREPQVYTLPPSRDELTKNQVSLTCLVKGFYPSDIAVEWESNGQPENNYKTTPPVLDSDGSFFLYSKLTVDKSRWQQGNVFSCSVMHEALHNHYTQKSLSLSPGK

SEQ ID NO: 120 - protein, 341 aa, Artificial Sequence
  X0113 (CkCH2CH3) T56W mature protein without the signal peptide
TVAAPSVFIFPPSDEQLKSGTASVVCLLNNFYPREAKVQWKVDNALQSGNSQESVWEQDSKDSTYSLSSTLTLSKADYEKHKVYACEVTHQGLSSPVTKSFNRGERTEPKSSDKTHTCPPCPSGAPELLGGPSVFLFPPKPKDTLMISRTPEVTCVVVDVSHEDPEVKFNWYVDGVEVHNAKTKPREEQYNSTYRVVSVLTVLHQDWLNGKEYKCKVSNKALPAPIEKTISKAKGQPREPQVYTLPPSRDELTKNQVSLTCLVKGFYPSDIAVEWESNGQPENNYKTTPPVLDSDGSFFLYSKLTVDKSRWQQGNVFSCSVMHEALHNHYTQKSLSLSPGK

SEQ ID NO: 121 - protein, 341 aa, Artificial Sequence
  X0113 (CkCH2CH3) S68R mature protein without the signal peptide
TVAAPSVFIFPPSDEQLKSGTASVVCLLNNFYPREAKVQWKVDNALQSGNSQESVTEQDSKDSTYSLRSTLTLSKADYEKHKVYACEVTHQGLSSPVTKSFNRGERTEPKSSDKTHTCPPCPSGAPELLGGPSVFLFPPKPKDTLMISRTPEVTCVVVDVSHEDPEVKFNWYVDGVEVHNAKTKPREEQYNSTYRVVSVLTVLHQDWLNGKEYKCKVSNKALPAPIEKTISKAKGQPREPQVYTLPPSRDELTKNQVSLTCLVKGFYPSDIAVEWESNGQPENNYKTTPPVLDSDGSFFLYSKLTVDKSRWQQGNVFSCSVMHEALHNHYTQKSLSLSPGK

SEQ ID NO: 122 - protein, 341 aa, Artificial Sequence
  X0113 (CkCH2CH3) S68W mature protein without the signal peptide
TVAAPSVFIFPPSDEQLKSGTASVVCLLNNFYPREAKVQWKVDNALQSGNSQESVTEQDSKDSTYSLWSTLTLSKADYEKHKVYACEVTHQGLSSPVTKSFNRGERTEPKSSDKTHTCPPCPSGAPELLGGPSVFLFPPKPKDTLMISRTPEVTCVVVDVSHEDPEVKFNWYVDGVEVHNAKTKPREEQYNSTYRVVSVLTVLHQDWLNGKEYKCKVSNKALPAPIEKTISKAKGQPREPQVYTLPPSRDELTKNQVSLTCLVKGFYPSDIAVEWESNGQPENNYKTTPPVLDSDGSFFLYSKLTVDKSRWQQGNVFSCSVMHEALHNHYTQKSLSLSPGK

SEQ ID NO: 123 - protein, 341 aa, Artificial Sequence
  X0113 (CkCH2CH3) T70R mature protein without the signal peptide
TVAAPSVFIFPPSDEQLKSGTASVVCLLNNFYPREAKVQWKVDNALQSGNSQESVTEQDSKDSTYSLSSRLTLSKADYEKHKVYACEVTHQGLSSPVTKSFNRGERTEPKSSDKTHTCPPCPSGAPELLGGPSVFLFPPKPKDTLMISRTPEVTCVVVDVSHEDPEVKFNWYVDGVEVHNAKTKPREEQYNSTYRVVSVLTVLHQDWLNGKEYKCKVSNKALPAPIEKTISKAKGQPREPQVYTLPPSRDELTKNQVSLTCLVKGFYPSDIAVEWESNGQPENNYKTTPPVLDSDGSFFLYSKLTVDKSRWQQGNVFSCSVMHEALHNHYTQKSLSLSPGK

SEQ ID NO: 124 - protein, 341 aa, Artificial Sequence
  X0113 (CkCH2CH3) T70W mature protein without the signal peptide
TVAAPSVFIFPPSDEQLKSGTASVVCLLNNFYPREAKVQWKVDNALQSGNSQESVTEQDSKDSTYSLSSWLTLSKADYEKHKVYACEVTHQGLSSPVTKSFNRGERTEPKSSDKTHTCPPCPSGAPELLGGPSVFLFPPKPKDTLMISRTPEVTCVVVDVSHEDPEVKFNWYVDGVEVHNAKTKPREEQYNSTYRVVSVLTVLHQDWLNGKEYKCKVSNKALPAPIEKTISKAKGQPREPQVYTLPPSRDELTKNQVSLTCLVKGFYPSDIAVEWESNGQPENNYKTTPPVLDSDGSFFLYSKLTVDKSRWQQGNVFSCSVMHEALHNHYTQKSLSLSPGK

SEQ ID NO: 125 - protein, 20 aa, Artificial Sequence
  NKG2D Linker
NSLFNQEVQIPLTESYSPNS

SEQ ID NO: 126 - DNA, 1083 bp, Artificial Sequence
  X0229 (Ck WYAE (N29W N30Y V55A T70E) CH2 CH3
  sig_peptide (1)...(60)
atggaagcaccagcgcagcttctcttcctcctgctactctggctcccagataccaccggtactgtggctgcaccatctgtcttcatcttcccgccatctgatgagcagttgaaatctggaactgcctctgttgtgtgcctgctgtggtacttctatcccagagaggccaaagtacagtggaaggtggataacgccctccaatcgggtaactcccaggagagtgccacagagcaggacagcaaggacagcacctacagcctcagcagcgagctgacgctgagcaaagcagactacgagaaacacaaagtctacgcctgcgaagtcacccatcagggcctgagctcgcccgtcacaaagagcttcaacaggggagagcgtacggagcccaaatcttctgacaaaactcacacatgcccaccgtgcccatccggagcacctgaactcctgggtggaccgtcagtcttcctcttccccccaaaacccaaggacaccctcatgatctcccggacccctgaggtcacatgcgtggtggtggacgtgagccacgaagaccctgaggtcaagttcaactggtacgtggacggcgtggaggtgcataatgccaagacaaagccgcgggaggagcagtacaacagcacgtaccgtgtggtcagcgtcctcaccgtcctgcaccaggactggctgaatggcaaggagtacaagtgcaaggtctccaacaaagccctcccagcccccatcgagaaaaccatctccaaagccaaagggcagccccgagaaccacaggtgtacaccctgcccccatcccgggatgagctgaccaagaaccaggtcagcctgacctgcctggtcaaaggcttctatccaagcgacatcgccgtggagtgggagagcaatgggcagccggagaacaactacaagaccacgcctcccgtgctggactccgacggctccttcttcctctacagcaagctcaccgtggacaagagcaggtggcagcaggggaacgtcttctcatgctccgtgatgcatgaggctctgcacaaccactacacgcagaagagcctctccctgtctccgggtaaa

SEQ ID NO: 127 - protein, 361 aa, Artificial Sequence
  X0229 (Ck WYAE (N29W N30Y V55A T70E) CH2 CH3
  SIGNAL (1)...(20)
MEAPAQLLFLLLLWLPDTTGTVAAPSVFIFPPSDEQLKSGTASVVCLLWYFYPREAKVQWKVDNALQSGNSQESATEQDSKDSTYSLSSELTLSKADYEKHKVYACEVTHQGLSSPVTKSFNRGERTEPKSSDKTHTCPPCPSGAPELLGGPSVFLFPPKPKDTLMISRTPEVTCVVVDVSHEDPEVKFNWYVDGVEVHNAKTKPREEQYNSTYRVVSVLTVLHQDWLNGKEYKCKVSNKALPAPIEKTISKAKGQPREPQVYTLPPSRDELTKNQVSLTCLVKGFYPSDIAVEWESNGQPENNYKTTPPVLDSDGSFFLYSKLTVDKSRWQQGNVFSCSVMHEALHNHYTQKSLSLSPGK

SEQ ID NO: 128 - DNA, 1083 bp, Artificial Sequence
  X0231 (Ck YYAE (N29Y N30Y V55A T70E) CH2 CH3)
  sig_peptide (1)...(60)
atggaagcaccagcgcagcttctcttcctcctgctactctggctcccagataccaccggtactgtggctgcaccatctgtcttcatcttcccgccatctgatgagcagttgaaatctggaactgcctctgttgtgtgcctgctgtactacttctatcccagagaggccaaagtacagtggaaggtggataacgccctccaatcgggtaactcccaggagagtgccacagagcaggacagcaaggacagcacctacagcctcagcagcgagctgacgctgagcaaagcagactacgagaaacacaaagtctacgcctgcgaagtcacccatcagggcctgagctcgcccgtcacaaagagcttcaacaggggagagcgtacggagcccaaatcttctgacaaaactcacacatgcccaccgtgcccatccggagcacctgaactcctgggtggaccgtcagtcttcctcttccccccaaaacccaaggacaccctcatgatctcccggacccctgaggtcacatgcgtggtggtggacgtgagccacgaagaccctgaggtcaagttcaactggtacgtggacggcgtggaggtgcataatgccaagacaaagccgcgggaggagcagtacaacagcacgtaccgtgtggtcagcgtcctcaccgtcctgcaccaggactggctgaatggcaaggagtacaagtgcaaggtctccaacaaagccctcccagcccccatcgagaaaaccatctccaaagccaaagggcagccccgagaaccacaggtgtacaccctgcccccatcccgggatgagctgaccaagaaccaggtcagcctgacctgcctggtcaaaggcttctatccaagcgacatcgccgtggagtgggagagcaatgggcagccggagaacaactacaagaccacgcctcccgtgctggactccgacggctccttcttcctctacagcaagctcaccgtggacaagagcaggtggcagcaggggaacgtcttctcatgctccgtgatgcatgaggctctgcacaaccactacacgcagaagagcctctccctgtctccgggtaaa

SEQ ID NO: 129 - protein, 361 aa, Artificial Sequence
  X0231 (Ck YYAE (N29Y N30Y V55A T70E) CH2 CH3)
  SIGNAL (1)...(20)
MEAPAQLLFLLLLWLPDTTGTVAAPSVFIFPPSDEQLKSGTASVVCLLYYFYPREAKVQWKVDNALQSGNSQESATEQDSKDSTYSLSSELTLSKADYEKHKVYACEVTHQGLSSPVTKSFNRGERTEPKSSDKTHTCPPCPSGAPELLGGPSVFLFPPKPKDTLMISRTPEVTCVVVDVSHEDPEVKFNWYVDGVEVHNAKTKPREEQYNSTYRVVSVLTVLHQDWLNGKEYKCKVSNKALPAPIEKTISKAKGQPREPQVYTLPPSRDELTKNQVSLTCLVKGFYPSDIAVEWESNGQPENNYKTTPPVLDSDGSFFLYSKLTVDKSRWQQGNVFSCSVMHEALHNHYTQKSLSLSPGK

SEQ ID NO: 130 - DNA, 1083 bp, Artificial Sequence
  X0193 (Ck EAE (N30E V55A T70E) CH2 CH3)
  sig_peptide (1)...(60)
atggaagcaccagcgcagcttctcttcctcctgctactctggctcccagataccaccggtactgtggctgcaccatctgtcttcatcttcccgccatctgatgagcagttgaaatctggaactgcctctgttgtgtgcctgctgaatgagttctatcccagagaggccaaagtacagtggaaggtggataacgccctccaatcgggtaactcccaggagagtgccacagagcaggacagcaaggacagcacctacagcctcagcagcgagctgacgctgagcaaagcagactacgagaaacacaaagtctacgcctgcgaagtcacccatcagggcctgagctcgcccgtcacaaagagcttcaacaggggagagcgtacggagcccaaatcttctgacaaaactcacacatgcccaccgtgcccatccggagcacctgaactcctgggtggaccgtcagtcttcctcttccccccaaaacccaaggacaccctcatgatctcccggacccctgaggtcacatgcgtggtggtggacgtgagccacgaagaccctgaggtcaagttcaactggtacgtggacggcgtggaggtgcataatgccaagacaaagccgcgggaggagcagtacaacagcacgtaccgtgtggtcagcgtcctcaccgtcctgcaccaggactggctgaatggcaaggagtacaagtgcaaggtctccaacaaagccctcccagcccccatcgagaaaaccatctccaaagccaaagggcagccccgagaaccacaggtgtacaccctgcccccatcccgggatgagctgaccaagaaccaggtcagcctgacctgcctggtcaaaggcttctatccaagcgacatcgccgtggagtgggagagcaatgggcagccggagaacaactacaagaccacgcctcccgtgctggactccgacggctccttcttcctctacagcaagctcaccgtggacaagagcaggtggcagcaggggaacgtcttctcatgctccgtgatgcatgaggctctgcacaaccactacacgcagaagagcctctccctgtctccgggtaaa

SEQ ID NO: 131 - protein, 361 aa, Artificial Sequence
  X0193 (Ck EAE (N30E V55A T70E) CH2 CH3)
  SIGNAL (1)...(20)
MEAPAQLLFLLLLWLPDTTGTVAAPSVFIFPPSDEQLKSGTASVVCLLNEFYPREAKVQWKVDNALQSGNSQESATEQDSKDSTYSLSSELTLSKADYEKHKVYACEVTHQGLSSPVTKSFNRGERTEPKSSDKTHTCPPCPSGAPELLGGPSVFLFPPKPKDTLMISRTPEVTCVVVDVSHEDPEVKFNWYVDGVEVHNAKTKPREEQYNSTYRVVSVLTVLHQDWLNGKEYKCKVSNKALPAPIEKTISKAKGQPREPQVYTLPPSRDELTKNQVSLTCLVKGFYPSDIAVEWESNGQPENNYKTTPPVLDSDGSFFLYSKLTVDKSRWQQGNVFSCSVMHEALHNHYTQKSLSLSPGK

SEQ ID NO: 132 - DNA, 1083 bp, Artificial Sequence
  X0220 (Ck YAE (N30Y V55A T70E) CH2 CH3)
  sig_peptide (1)...(60)
atggaagcaccagcgcagcttctcttcctcctgctactctggctcccagataccaccggtactgtggctgcaccatctgtcttcatcttcccgccatctgatgagcagttgaaatctggaactgcctctgttgtgtgcctgctgaattacttctatcccagagaggccaaagtacagtggaaggtggataacgccctccaatcgggtaactcccaggagagtgccacagagcaggacagcaaggacagcacctacagcctcagcagcgagctgacgctgagcaaagcagactacgagaaacacaaagtctacgcctgcgaagtcacccatcagggcctgagctcgcccgtcacaaagagcttcaacaggggagagcgtacggagcccaaatcttctgacaaaactcacacatgcccaccgtgcccatccggagcacctgaactcctgggtggaccgtcagtcttcctcttccccccaaaacccaaggacaccctcatgatctcccggacccctgaggtcacatgcgtggtggtggacgtgagccacgaagaccctgaggtcaagttcaactggtacgtggacggcgtggaggtgcataatgccaagacaaagccgcgggaggagcagtacaacagcacgtaccgtgtggtcagcgtcctcaccgtcctgcaccaggactggctgaatggcaaggagtacaagtgcaaggtctccaacaaagccctcccagcccccatcgagaaaaccatctccaaagccaaagggcagccccgagaaccacaggtgtacaccctgcccccatcccgggatgagctgaccaagaaccaggtcagcctgacctgcctggtcaaaggcttctatccaagcgacatcgccgtggagtgggagagcaatgggcagccggagaacaactacaagaccacgcctcccgtgctggactccgacggctccttcttcctctacagcaagctcaccgtggacaagagcaggtggcagcaggggaacgtcttctcatgctccgtgatgcatgaggctctgcacaaccactacacgcagaagagcctctccctgtctccgggtaaa

SEQ ID NO: 133 - protein, 361 aa, Artificial Sequence
  X0220 (Ck YAE (N30Y V55A T70E) CH2 CH3)
  SIGNAL (1)...(20)
MEAPAQLLFLLLLWLPDTTGTVAAPSVFIFPPSDEQLKSGTASVVCLLNYFYPREAKVQWKVDNALQSGNSQESATEQDSKDSTYSLSSELTLSKADYEKHKVYACEVTHQGLSSPVTKSFNRGERTEPKSSDKTHTCPPCPSGAPELLGGPSVFLFPPKPKDTLMISRTPEVTCVVVDVSHEDPEVKFNWYVDGVEVHNAKTKPREEQYNSTYRVVSVLTVLHQDWLNGKEYKCKVSNKALPAPIEKTISKAKGQPREPQVYTLPPSRDELTKNQVSLTCLVKGFYPSDIAVEWESNGQPENNYKTTPPVLDSDGSFFLYSKLTVDKSRWQQGNVFSCSVMHEALHNHYTQKSLSLSPGK

SEQ ID NO: 134 - DNA, 1785 bp, Artificial Sequence
  X0234 (P2C2 CH1 CH2 CH3)
  sig_peptide (1)...(60)
atggaagcaccagcgcagcttctcttcctcctgctactctggctcccagataccaccggtgatattgtgatgatccaggatgaactctccaatcctgtcagttctggagaatcagtttccatctcctgtaggtctagtaagagtctcctagataaggaagggaagacatacttgaattggtttctgcagagaccaggacaatctcctcagctcctgatctatctgatgtccatgcgtgaatcaggagtctcagaccggtttagtggcagtgggtcaggaacagatttcaccctggaaatcagtagagtgaaggctgaggatgtgggtgtgtattactgtcaacaacttgtagagtatccgtggacgttcggtggaggcaccaagctggaaatcaaaggtggcggtggctctggcggaggtggatccggtggcggcggctctcagatccagttggtgcagtctggacctgagctgaagaagcctggagagacagtcaagatctcctgcaaggcttctggttataccttcacagacttttcaatgcactgggtgaggcaggctccaggaaagggtttaaagtggatgggctggataaacactgagactggtgagccaacatatgcagatgacttcaggggacggtttgccttctctttggaaacttctgccagcactgcctatttgcagatcaacaacctcaaaaatgaggacacggctacatatttttgtacctggtctgcttactggggccaagggactctggtcactgtctctgcctcgagcgcctccaccaagggcccatcggtcttccccctggcaccctcctccaagagcacctctgggggcacagcggccctgggctgcctggtcaaggactacttccccgagccggtgacggtgtcgtggaactcaggcgccctgaccagcggcgtgcacaccttcccggctgtcctacagtcctcaggactctactccctcagcagcgtggtgaccgtgccctccagcagcttgggcacccagacctacatctgcaacgtgaatcacaagcccagcaacaccaaggtggacaagaaagttcgtacggagcccaaatcttctgacaaaactcacacatgcccaccgtgcccatccggagcacctgaactcctgggtggaccgtcagtcttcctcttccccccaaaacccaaggacaccctcatgatctcccggacccctgaggtcacatgcgtggtggtggacgtgagccacgaagaccctgaggtcaagttcaactggtacgtggacggcgtggaggtgcataatgccaagacaaagccgcgggaggagcagtacaacagcacgtaccgtgtggtcagcgtcctcaccgtcctgcaccaggactggctgaatggcaaggagtacaagtgcaaggtctccaacaaagccctcccagcccccatcgagaaaaccatctccaaagccaaagggcagccccgagaaccacaggtgtacaccctgcccccatcccgggatgagctgaccaagaaccaggtcagcctgacctgcctggtcaaaggcttctatccaagcgacatcgccgtggagtgggagagcaatgggcagccggagaacaactacaagaccacgcctcccgtgctggactccgacggctccttcttcctctacagcaagctcaccgtggacaagagcaggtggcagcaggggaacgtcttctcatgctccgtgatgcatgaggctctgcacaaccactacacgcagaagagcctctccctgtctccgggtaaa

SEQ ID NO: 135 - protein, 595 aa, Artificial Sequence
  X0234 (P2C2 CH1 CH2 CH3)
  SIGNAL (1)...(20)
MEAPAQLLFLLLLWLPDTTGDIVMIQDELSNPVSSGESVSISCRSSKSLLDKEGKTYLNWFLQRPGQSPQLLIYLMSMRESGVSDRFSGSGSGTDFTLEISRVKAEDVGVYYCQQLVEYPWTFGGGTKLEIKGGGGSGGGGSGGGGSQIQLVQSGPELKKPGETVKISCKASGYTFTDFSMHWVRQAPGKGLKWMGWINTETGEPTYADDFRGRFAFSLETSASTAYLQINNLKNEDTATYFCTWSAYWGQGTLVTVSASSASTKGPSVFPLAPSSKSTSGGTAALGCLVKDYFPEPVTVSWNSGALTSGVHTFPAVLQSSGLYSLSSVVTVPSSSLGTQTYICNVNHKPSNTKVDKKVRTEPKSSDKTHTCPPCPSGAPELLGGPSVFLFPPKPKDTLMISRTPEVTCVVVDVSHEDPEVKFNWYVDGVEVHNAKTKPREEQYNSTYRVVSVLTVLHQDWLNGKEYKCKVSNKALPAPIEKTISKAKGQPREPQVYTLPPSRDELTKNQVSLTCLVKGFYPSDIAVEWESNGQPENNYKTTPPVLDSDGSFFLYSKLTVDKSRWQQGNVFSCSVMHEALHNHYTQKSLSLSPGK

SEQ ID NO: 136 - DNA, 1089 bp, Artificial Sequence
  X0225 (CH2 CH3 Ck YAE (N30Y V55A T70E)
  sig_peptide (1)...(60)
atggaagcaccagcgcagcttctcttcctcctgctactctggctcccagataccaccggttcctcggagcccaaatcttctgacaaaactcacacatgcccaccgtgcccatccggagcacctgaactcctgggtggaccgtcagtcttcctcttccccccaaaacccaaggacaccctcatgatctcccggacccctgaggtcacatgcgtggtggtggacgtgagccacgaagaccctgaggtcaagttcaactggtacgtggacggcgtggaggtgcataatgccaagacaaagccgcgggaggagcagtacaacagcacgtaccgtgtggtcagcgtcctcaccgtcctgcaccaggactggctgaatggcaaggagtacaagtgcaaggtctccaacaaagccctcccagcccccatcgagaaaaccatctccaaagccaaagggcagccccgagaaccacaggtgtacaccctgcccccatcccgggatgagctgaccaagaaccaggtcagcctgacctgcctggtcaaaggcttctatccaagcgacatcgccgtggagtgggagagcaatgggcagccggagaacaactacaagaccacgcctcccgtgctggactccgacggctccttcttcctctacagcaagctcaccgtggacaagagcaggtggcagcaggggaacgtcttctcatgctccgtgatgcatgaggctctgcacaaccactacacgcagaagagcctctccctgtctccgggtaaatctagaactgtggctgcaccatctgtcttcatcttcccgccatctgatgagcagttgaaatctggaactgcctctgttgtgtgcctgctgaattacttctatcccagagaggccaaagtacagtggaaggtggataacgccctccaatcgggtaactcccaggagagtgccacagagcaggacagcaaggacagcacctacagcctcagcagcgagctgacgctgagcaaagcagactacgagaaacacaaagtctacgcctgcgaagtcacccatcagggcctgagctcgcccgtcacaaagagcttcaacaggggagag

SEQ ID NO: 137 - protein, 363 aa, Artificial Sequence
  X0225 (CH2 CH3 Ck YAE (N30Y V55A T70E)
  SIGNAL (1)...(20)
MEAPAQLLFLLLLWLPDTTGSSEPKSSDKTHTCPPCPSGAPELLGGPSVFLFPPKPKDTLMISRTPEVTCVVVDVSHEDPEVKFNWYVDGVEVHNAKTKPREEQYNSTYRVVSVLTVLHQDWLNGKEYKCKVSNKALPAPIEKTISKAKGQPREPQVYTLPPSRDELTKNQVSLTCLVKGFYPSDIAVEWESNGQPENNYKTTPPVLDSDGSFFLYSKLTVDKSRWQQGNVFSCSVMHEALHNHYTQKSLSLSPGKSRTVAAPSVFIFPPSDEQLKSGTASVVCLLNYFYPREAKVQWKVDNALQSGNSQESATEQDSKDSTYSLSSELTLSKADYEKHKVYACEVTHQGLSSPVTKSFNRGE

SEQ ID NO: 138 - DNA, 2127 bp, Artificial Sequence
  5D5 scFv CH1 CH2 CH3 Ck
atggaagcaccagcgcagcttctcttcctcctgctactctggctcccagataccaccggtgactttatgatgtcacagtctccatcctccctaactgtgtcagttggagagaaggttactgtgagctgcaagtccagtcagtcccttttatatactagcagtcagaagaactacttggcctggtaccagcagaaaccaggtcagtctcctaaactgctgatttactgggcatccactagggaatctggggtccctgatcgcttcacaggcagtggatctgggacagatttcactctcaccatcaccagtgtgaaggctgacgacctggcagtttattactgtcagcaatattatgcctatccgtggacgttcggtggaggcaccaagttggagctcaaaggtggcggtggctctggcggaggtggatccggtggcggcggctctcaggtccaactgcagcagtctgggcctgagctggtgaggcctggggcttcagtgaagatgtcctgcagggcttcgggctataccttcaccagctactggttgcactgggttaaacagaggcctggacaaggccttgagtggattggcatgattgatccttccaatagtgacactaggtttaatccgaacttcaaggacaaggccacattgaatgtagacagatcttccaacacagcctacatgctgctcagcagcctgacatctgctgactctgcagtctattactgtgccacatatggtagctacgtttcccctctggactactggggtcaaggaacctcagtcaccgtctcctcgagcgcctccaccaagggcccatcggtcttccccctggcaccctcctccaagagcacctctgggggcacagcggccctgggctgcctggtcaaggactacttccccgagccggtgacggtgtcgtggaactcaggcgccctgaccagcggcgtgcacaccttcccggctgtcctacagtcctcaggactctactccctcagcagcgtggtgaccgtgccctccagcagcttgggcacccagacctacatctgcaacgtgaatcacaagcccagcaacaccaaggtggacaagaaagttcgtacggagcccaaatcttctgacaaaactcacacatgcccaccgtgcccatccggagcacctgaactcctgggtggaccgtcagtcttcctcttccccccaaaacccaaggacaccctcatgatctcccggacccctgaggtcacatgcgtggtggtggacgtgagccacgaagaccctgaggtcaagttcaactggtacgtggacggcgtggaggtgcataatgccaagacaaagccgcgggaggagcagtacaacagcacgtaccgtgtggtcagcgtcctcaccgtcctgcaccaggactggctgaatggcaaggagtacaagtgcaaggtctccaacaaagccctcccagcccccatcgagaaaaccatctccaaagccaaagggcagccccgagaaccacaggtgtacaccctgcccccatcccgggatgagctgaccaagaaccaggtcagcctgacctgcctggtcaaaggcttctatccaagcgacatcgccgtggagtgggagagcaatgggcagccggagaacaactacaagaccacgcctcccgtgctggactccgacggctccttcttcctctacagcaagctcaccgtggacaagagcaggtggcagcaggggaacgtcttctcatgctccgtgatgcatgaggctctgcacaaccactacacgcagaagagcctctccctgtctccgggtaaatctagaactgtggctgcaccatctgtcttcatcttcccgccatctgatgagcagttgaaatctggaactgcctctgttgtgtgcctgctgaataacttctatcccagagaggccaaagtacagtggaaggtggataacgccctccaatcgggtaactcccaggagagtgtcacagagcaggacagcaaggacagcacctacagcctcagcagcaccctgacgctgagcaaagcagactacgagaaacacaaagtctacgcctgcgaagtcacccatcagggcctgagctcgcccgtcacaaagagcttcaacaggggagag

SEQ ID NO: 139 - protein, 689 aa, Artificial Sequence
  5D5 scFv CH1 CH2 CH3 Ck
DFMMSQSPSSLTVSVGEKVTVSCKSSQSLLYTSSQKNYLAWYQQKPGQSPKLLIYWASTRESGVPDRFTGSGSGTDFTLTITSVKADDLAVYYCQQYYAYPWTFGGGTKLELKGGGGSGGGGSGGGGSQVQLQQSGPELVRPGASVKMSCRASGYTFTSYWLHWVKQRPGQGLEWIGMIDPSNSDTRFNPNFKDKATLNVDRSSNTAYMLLSSLTSADSAVYYCATYGSYVSPLDYWGQGTSVTVSSSASTKGPSVFPLAPSSKSTSGGTAALGCLVKDYFPEPVTVSWNSGALTSGVHTFPAVLQSSGLYSLSSVVTVPSSSLGTQTYICNVNHKPSNTKVDKKVRTEPKSSDKTHTCPPCPSGAPELLGGPSVFLFPPKPKDTLMISRTPEVTCVVVDVSHEDPEVKFNWYVDGVEVHNAKTKPREEQYNSTYRVVSVLTVLHQDWLNGKEYKCKVSNKALPAPIEKTISKAKGQPREPQVYTLPPSRDELTKNQVSLTCLVKGFYPSDIAVEWESNGQPENNYKTTPPVLDSDGSFFLYSKLTVDKSRWQQGNVFSCSVMHEALHNHYTQKSLSLSPGKSRTVAAPSVFIFPPSDEQLKSGTASVVCLLNNFYPREAKVQWKVDNALQSGNSQESVTEQDSKDSTYSLSSTLTLSKADYEKHKVYACEVTHQGLSSPVTKSFNRGE

SEQ ID NO: 140 - protein, 105 aa, Artificial Sequence
  Altered human Cl sequence used in constructing Interceptors
QPKANPTVTLFPPSSEELQANKATLVCLISDFYPGAVTVAWKADGSPVKAGVETTKPSKQSNNKYAASSYLSLTPEQWKSHRSYSCQVTHEGSTVEKTVAPTESS

SEQ ID NO: 141 - protein, 105 aa, Artificial Sequence
  Altered human Ck sequence used in constructing Interceptors
TVAAPSVFIFPPSDEQLKSGTASVVCLLNNFYPREAKVQWKVDNALQSGNSQESVTEQDSKDSTYSLSSTLTLSKADYEKHKVYACEVTHQGLSSPVTKSFNRGE

SEQ ID NO: 142 - protein, 105 aa, Artificial Sequence
  Altered human Ck with N29A substitution
TVAAPSVFIFPPSDEQLKSGTASVVCLLANFYPREAKVQWKVDNALQSGNSQESVTEQDSKDSTYSLSSTLTLSKADYEKHKVYACEVTHQGLSSPVTKSFNRGE

SEQ ID NO: 143 - protein, 105 aa, Artificial Sequence
  Altered human Ck with N30A substitution
TVAAPSVFIFPPSDEQLKSGTASVVCLLNAFYPREAKVQWKVDNALQSGNSQESVTEQDSKDSTYSLSSTLTLSKADYEKHKVYACEVTHQGLSSPVTKSFNRGE

SEQ ID NO: 144 - protein, 105 aa, Artificial Sequence
  Altered human Ck with Q52A substitution
TVAAPSVFIFPPSDEQLKSGTASVVCLLNNFYPREAKVQWKVDNALQSGNSAESVTEQDSKDSTYSLSSTLTLSKADYEKHKVYACEVTHQGLSSPVTKSFNRGE

SEQ ID NO: 145 - protein, 105 aa, Artificial Sequence
  Altered human Ck with V55A substitution
TVAAPSVFIFPPSDEQLKSGTASVVCLLNNFYPREAKVQWKVDNALQSGNSQESATEQDSKDSTYSLSSTLTLSKADYEKHKVYACEVTHQGLSSPVTKSFNRGE

SEQ ID NO: 146 - protein, 105 aa, Artificial Sequence
  Altered human Ck with T56A substitution
TVAAPSVFIFPPSDEQLKSGTASVVCLLNNFYPREAKVQWKVDNALQSGNSQESVAEQDSKDSTYSLSSTLTLSKADYEKHKVYACEVTHQGLSSPVTKSFNRGE

SEQ ID NO: 147 - protein, 105 aa, Artificial Sequence
  Altered human Ck with S68A substitution
TVAAPSVFIFPPSDEQLKSGTASVVCLLNNFYPREAKVQWKVDNALQSGNSQESVTEQDSKDSTYSLASTLTLSKADYEKHKVYACEVTHQGLSSPVTKSFNRGE

SEQ ID NO: 148 - protein, 105 aa, Artificial Sequence
  Altered human Ck with T70A substitution
TVAAPSVFIFPPSDEQLKSGTASVVCLLNNFYPREAKVQWKVDNALQSGNSQESVTEQDSKDSTYSLSSALTLSKADYEKHKVYACEVTHQGLSSPVTKSFNRGE

SEQ ID NO: 149 - protein, 105 aa, Artificial Sequence
  Altered human Ck with V55A N29A substitution
TVAAPSVFIFPPSDEQLKSGTASVVCLLANFYPREAKVQWKVDNALQSGNSQESATEQDSKDSTYSLSSTLTLSKADYEKHKVYACEVTHQGLSSPVTKSFNRGE

SEQ ID NO: 150 - protein, 105 aa, Artificial Sequence
  Altered human Ck with V55A N30A substitution
TVAAPSVFIFPPSDEQLKSGTASVVCLLNAFYPREAKVQWKVDNALQSGNSQESATEQDSKDSTYSLSSTLTLSKADYEKHKVYACEVTHQGLSSPVTKSFNRGE

SEQ ID NO: 151 - protein, 105 aa, Artificial Sequence
  Altered human Ck with V55A Q52A substitution
TVAAPSVFIFPPSDEQLKSGTASVVCLLNNFYPREAKVQWKVDNALQSGNSAESATEQDSKDSTYSLSSTLTLSKADYEKHKVYACEVTHQGLSSPVTKSFNRGE

SEQ ID NO: 152 - protein, 105 aa, Artificial Sequence
  Altered human Ck with V55A S68A substitution
TVAAPSVFIFPPSDEQLKSGTASVVCLLNNFYPREAKVQWKVDNALQSGNSQESATEQDSKDSTYSLASTLTLSKADYEKHKVYACEVTHQGLSSPVTKSFNRGE

SEQ ID NO: 153 - protein, 105 aa, Artificial Sequence
  Altered human Ck with V55A T70A substitution
TVAAPSVFIFPPSDEQLKSGTASVVCLLNNFYPREAKVQWKVDNALQSGNSQESATEQDSKDSTYSLSSALTLSKADYEKHKVYACEVTHQGLSSPVTKSFNRGE

SEQ ID NO: 154 - protein, 105 aa, Artificial Sequence
  Altered human Ck with V55A N29A N30A substitution
TVAAPSVFIFPPSDEQLKSGTASVVCLLAAFYPREAKVQWKVDNALQSGNSQESATEQDSKDSTYSLSSTLTLSKADYEKHKVYACEVTHQGLSSPVTKSFNRGE

SEQ ID NO: 155 - protein, 105 aa, Artificial Sequence
  Altered human Ck with V55A N29A S68A substitution
TVAAPSVFIFPPSDEQLKSGTASVVCLLANFYPREAKVQWKVDNALQSGNSQESATEQDSKDSTYSLASTLTLSKADYEKHKVYACEVTHQGLSSPVTKSFNRGE

SEQ ID NO: 156 - protein, 105 aa, Artificial Sequence
  Altered human Ck with V55A S68A T70A substitution
TVAAPSVFIFPPSDEQLKSGTASVVCLLNNFYPREAKVQWKVDNALQSGNSQESATEQDSKDSTYSLASALTLSKADYEKHKVYACEVTHQGLSSPVTKSFNRGE

SEQ ID NO: 157 - protein, 105 aa, Artificial Sequence
  Altered human Ck with V55A Q52A S68A substitution
TVAAPSVFIFPPSDEQLKSGTASVVCLLNNFYPREAKVQWKVDNALQSGNSAESATEQDSKDSTYSLASTLTLSKADYEKHKVYACEVTHQGLSSPVTKSFNRGE

SEQ ID NO: 158 - protein, 105 aa, Artificial Sequence
  Altered human Ck with N29R V55A T70A substitution
TVAAPSVFIFPPSDEQLKSGTASVVCLLRNFYPREAKVQWKVDNALQSGNSQESATEQDSKDSTYSLSSALTLSKADYEKHKVYACEVTHQGLSSPVTKSFNRGE

SEQ ID NO: 159 - protein, 105 aa, Artificial Sequence
  Altered human Ck with N29AK V55A T70A substitution
TVAAPSVFIFPPSDEQLKSGTASVVCLLKNFYPREAKVQWKVDNALQSGNSQESATEQDSKDSTYSLSSALTLSKADYEKHKVYACEVTHQGLSSPVTKSFNRGE

SEQ ID NO: 160 - protein, 105 aa, Artificial Sequence
  Altered human Ck with N29W V55A T70A substitution
TVAAPSVFIFPPSDEQLKSGTASVVCLLWNFYPREAKVQWKVDNALQSGNSQESATEQDSKDSTYSLSSALTLSKADYEKHKVYACEVTHQGLSSPVTKSFNRGE

SEQ ID NO: 161 - protein, 105 aa, Artificial Sequence
  Altered human Ck with N29Y V55A T70A substitution
TVAAPSVFIFPPSDEQLKSGTASVVCLLYNFYPREAKVQWKVDNALQSGNSQESATEQDSKDSTYSLSSALTLSKADYEKHKVYACEVTHQGLSSPVTKSFNRGE

SEQ ID NO: 162 - protein, 105 aa, Artificial Sequence
  Altered human Ck with S68K V55A substitution
TVAAPSVFIFPPSDEQLKSGTASVVCLLNNFYPREAKVQWKVDNALQSGNSQESATEQDSKDSTYSLKSTLTLSKADYEKHKVYACEVTHQGLSSPVTKSFNRGE

SEQ ID NO: 163 - protein, 105 aa, Artificial Sequence
  Altered human Ck with S68E V55A substitution
TVAAPSVFIFPPSDEQLKSGTASVVCLLNNFYPREAKVQWKVDNALQSGNSQESATEQDSKDSTYSLESTLTLSKADYEKHKVYACEVTHQGLSSPVTKSFNRGE

SEQ ID NO: 164 - protein, 105 aa, Artificial Sequence
  Altered human Ck with S68Q V55A substitution
TVAAPSVFIFPPSDEQLKSGTASVVCLLNNFYPREAKVQWKVDNALQSGNSQESATEQDSKDSTYSLQSTLTLSKADYEKHKVYACEVTHQGLSSPVTKSFNRGE

SEQ ID NO: 165 - protein, 105 aa, Artificial Sequence
  Altered human Ck with T70E V55A substitution
TVAAPSVFIFPPSDEQLKSGTASVVCLLNNFYPREAKVQWKVDNALQSGNSQESATEQDSKDSTYSLSSELTLSKADYEKHKVYACEVTHQGLSSPVTKSFNRGE

SEQ ID NO: 166 - protein, 105 aa, Artificial Sequence
  Altered human Ck with Q52L N29A N30A substitution
TVAAPSVFIFPPSDEQLKSGTASVVCLLAAFYPREAKVQWKVDNALQSGNSLESVTEQDSKDSTYSLSSTLTLSKADYEKHKVYACEVTHQGLSSPVTKSFNRGE

SEQ ID NO: 167 - protein, 105 aa, Artificial Sequence
  Altered human Ck with N30R V55A T70A substitution
TVAAPSVFIFPPSDEQLKSGTASVVCLLNRFYPREAKVQWKVDNALQSGNSQESATEQDSKDSTYSLSSALTLSKADYEKHKVYACEVTHQGLSSPVTKSFNRGE

SEQ ID NO: 168 - protein, 105 aa, Artificial Sequence
  Altered human Ck with N30K V55A T70A substitution
TVAAPSVFIFPPSDEQLKSGTASVVCLLNKFYPREAKVQWKVDNALQSGNSQESATEQDSKDSTYSLSSALTLSKADYEKHKVYACEVTHQGLSSPVTKSFNRGE

SEQ ID NO: 169 - protein, 105 aa, Artificial Sequence
  Altered human Ck with N30W V55A T70A substitution
TVAAPSVFIFPPSDEQLKSGTASVVCLLNWFYPREAKVQWKVDNALQSGNSQESATEQDSKDSTYSLSSALTLSKADYEKHKVYACEVTHQGLSSPVTKSFNRGE

SEQ ID NO: 170 - protein, 105 aa, Artificial Sequence
  Altered human Ck with N30E V55A T70A substitution
TVAAPSVFIFPPSDEQLKSGTASVVCLLNEFYPREAKVQWKVDNALQSGNSQESATEQDSKDSTYSLSSALTLSKADYEKHKVYACEVTHQGLSSPVTKSFNRGE

SEQ ID NO: 171 - protein, 105 aa, Artificial Sequence
  Altered human Ck with N30G V55A T70A substitution
TVAAPSVFIFPPSDEQLKSGTASVVCLLNGFYPREAKVQWKVDNALQSGNSQESATEQDSKDSTYSLSSALTLSKADYEKHKVYACEVTHQGLSSPVTKSFNRGE

SEQ ID NO: 172 - protein, 105 aa, Artificial Sequence
  Altered human Ck with V55R N29A N30A substitution
TVAAPSVFIFPPSDEQLKSGTASVVCLLAAFYPREAKVQWKVDNALQSGNSQESRTEQDSKDSTYSLSSTLTLSKADYEKHKVYACEVTHQGLSSPVTKSFNRGE

SEQ ID NO: 173 - protein, 105 aa, Artificial Sequence
  Altered human Ck with V55W N29A N30A substitution
TVAAPSVFIFPPSDEQLKSGTASVVCLLAAFYPREAKVQWKVDNALQSGNSQESWTEQDSKDSTYSLSSTLTLSKADYEKHKVYACEVTHQGLSSPVTKSFNRGE

SEQ ID NO: 174 - protein, 105 aa, Artificial Sequence
  Altered human Ck with V55E N29A N30A substitution
TVAAPSVFIFPPSDEQLKSGTASVVCLLAAFYPREAKVQWKVDNALQSGNSQESETEQDSKDSTYSLSSTLTLSKADYEKHKVYACEVTHQGLSSPVTKSFNRGE

SEQ ID NO: 175 - protein, 105 aa, Artificial Sequence
  Altered human Ck with N29W N30Y V55A T70E (WYAE) substitution
TVAAPSVFIFPPSDEQLKSGTASVVCLLWYFYPREAKVQWKVDNALQSGNSQESATEQDSKDSTYSLSSELTLSKADYEKHKVYACEVTHQGLSSPVTKSFNRGE

SEQ ID NO: 176 - protein, 105 aa, Artificial Sequence
  Altered human Ck with N29Y N30Y V55A T70E (YYAE) substitution
TVAAPSVFIFPPSDEQLKSGTASVVCLLYYFYPREAKVQWKVDNALQSGNSQESATEQDSKDSTYSLSSELTLSKADYEKHKVYACEVTHQGLSSPVTKSFNRGE

SEQ ID NO: 177 - protein, 105 aa, Artificial Sequence
  Altered human Ck with N30E V55A T70E (EAE) substitution
TVAAPSVFIFPPSDEQLKSGTASVVCLLNEFYPREAKVQWKVDNALQSGNSQESATEQDSKDSTYSLSSELTLSKADYEKHKVYACEVTHQGLSSPVTKSFNRGE

SEQ ID NO: 178 - protein, 105 aa, Artificial Sequence
  Altered human Ck with N30Y V55A T70E (YAE) substitution
TVAAPSVFIFPPSDEQLKSGTASVVCLLNYFYPREAKVQWKVDNALQSGNSQESATEQDSKDSTYSLSSELTLSKADYEKHKVYACEVTHQGLSSPVTKSFNRGE

SEQ ID NO: 179 - skipped

SEQ ID NO: 180 - protein, 15 aa, Artificial Sequence
  Altered human IgG1 SSS-P hinge
EPKSSDKTHTSPPSP

SEQ ID NO: 181 - protein, 15 aa, Artificial Sequence
  Altered human IgG1 SCC-P hinge
EPKSSDKTHTCPPCP

SEQ ID NO: 182 - protein, 112 aa, Artificial Sequence
  VL of P2C2 scFv
DIVMIQDELSNPVSSGESVSISCRSSKSLLDKEGKTYLNWFLQRPGQSPQLLIYLMSMRESGVSDRFSGSGSGTDFTLEISRVKAEDVGVYYCQQLVEYPWTFGGGTKLEIK

SEQ ID NO: 183 - protein, 15 aa, Artificial Sequence
  Linker of P2C2 scFv
GGGGSGGGGSGGGGS

SEQ ID NO: 184 - protein, 112 aa, Artificial Sequence
  VH of P2C2 scFv
QIQLVQSGPELKKPGETVKISCKASGYTFTDFSMHWVRQAPGKGLKWMGWINTETGEPTYADDFRGRFAFSLETSASTAYLQINNLKNEDTATYFCTWSAYWGQGTLVTVSA

SEQ ID NO: 185 - protein, 239 aa, Artificial Sequence
  full length of P2C2 scFv
DIVMIQDELSNPVSSGESVSISCRSSKSLLDKEGKTYLNWFLQRPGQSPQLLIYLMSMRESGVSDRFSGSGSGTDFTLEISRVKAEDVGVYYCQQLVEYPWTFGGGTKLEIKGGGGSGGGGSGGGGSQIQLVQSGPELKKPGETVKISCKASGYTFTDFSMHWVRQAPGKGLKWMGWINTETGEPTYADDFRGRFAFSLETSASTAYLQINNLKNEDTATYFCTWSAYWGQGTLVTVSA

SEQ ID NO: 186 - protein, 102 aa, Homo sapiens
ASPTSPKVFPLSLCSTQPDGNVVIACLVQGFFPQEPLSVTWSESGQGVTARNFPPSQDASGDLYTTSSQLTLPATQCLAGKSVTCHVKHYTNPSQDVTVPCP

SEQ ID NO: 187 - protein, 102 aa, Homo sapiens
ASPTSPKVFPLSLDSTPQDGNVVVACLVQGFFPQEPLSVTWSESGQNVTARNFPPSQDASGDLYTTSSQLTLPATQCPDGKSVTCHVKHYTNPSQDVTVPCP

SEQ ID NO: 188 - protein, 101 aa, Homo sapiens
APTKAPDVFPIISGCRHPKDNSPVVLACLITGYHPTSVTVTWYMGTQSQPQRTFPEIQRRDSYYMTSSQLSTPLQQWRQGEYKCVVQHTASKSKKEIFRWP

SEQ ID NO: 189 - protein, 103 aa, Homo sapiens
ASTQSPSVFPLTRCCKNIPSNATSVTLGCLATGYFPEPVMVTCDTGSLNGTTMTLPATTLTLSGHYATISLLTVSGAWAKQMFTCRVAHTPSSTDWVDNKTFS

SEQ ID NO: 190 - protein, 98 aa, Homo sapiens
ASTKGPSVFPLAPCSRSTSESTAALGCLVKDYFPEPVTVSWNSGALTSGVHTFPAVLQSSGLYSLSSVVTVPSSNFGTQTYTCNVDHKPSNTKVDKTV

SEQ ID NO: 191 - protein, 98 aa, Homo sapiens
ASTKGPSVFPLAPCSRSTSGGTAALGCLVKDYFPEPVTVSWNSGALTSGVHTFPAVLQSSGLYSLSSVVTVPSSSLGTQTYTCNVNHKPSNTKVDKRV

SEQ ID NO: 192 - protein, 98 aa, Homo sapiens
ASTKGPSVFPLAPCSRSTSESTAALGCLVKDYFPEPVTVSWNSGALTSGVHTFPAVLQSSGLYSLSSVVTVPSSSLGTKTYTCNVDHKPSNTKVDKRV

SEQ ID NO: 193 - protein, 341 aa, Artificial Sequence
  X0113(CkCH2CH3) T70E, N29A, N30A, V55A mature protein without the signal peptide
TVAAPSVFIFPPSDEQLKSGTASVVCLLAAFYPREAKVQWKVDNALQSGNSQESATEQDSKDSTYSLSSELTLSKADYEKHKVYACEVTHQGLSSPVTKSFNRGERTEPKSSDKTHTCPPCPSGAPELLGGPSVFLFPPKPKDTLMISRTPEVTCVVVDVSHEDPEVKFNWYVDGVEVHNAKTKPREEQYNSTYRVVSVLTVLHQDWLNGKEYKCKVSNKALPAPIEKTISKAKGQPREPQVYTLPPSRDELTKNQVSLTCLVKGFYPSDIAVEWESNGQPENNYKTTPPVLDSDGSFFLYSKLTVDKSRWQQGNVFSCSVMHEALHNHYTQKSLSLSPGK

SEQ ID NO: 194 - protein, 104 aa, Homo sapiens
GSASAPTLFPLVSCENSPSDTSSVAVGCLAQDFLPDSITLSWKYKNNSDISSTRGFPSVLRGGKYAATSQVLLPSKDVMQGTDEHVVCKVQHPNGNKEKNVPLP

SEQ ID NO: 195 - protein, 101 aa, Homo sapiens
CCHPRLSLHRPALEDLLLGSEANLTCTLTGLRDASGVTFTWTPSSGKSAVQGPPERDLCGCYSVSSVLPGCAEPWNHGKTFTCTAAYPESKTPLTATLSKS

SEQ ID NO: 196 - protein, 101 aa, Homo sapiens
CCHPRLSLHRPALEDLLLGSEANLTCTLTGLRDASGATFTWTPSSGKSAVQGPPERDLCGCYSVSSVLPGCAQPWNHGETFTCTAAHPELKTPLTANITKS

SEQ ID NO: 197 - protein, 108 aa, Homo sapiens
ECPSHTQPLGVYLLTPAVQDLWLRDKATFTCFVVGSDLKDAHLTWEVAGKVPTGGVEEGLLERHSNGSQSQHSRLTLPRSLWNAGTSVTCTLNHPSLPPQRLMALREP

SEQ ID NO: 198 - protein, 107 aa, Homo sapiens
VCSRDFTPPTVKILQSSCDGGGHFPPTIQLLCLVSGYTPGTINITWLEDGQVMDVDLSTASTTQEGELASTQSELTLSQKHWLSDRTYTCQVTYQGHTFEDSTKKCA

SEQ ID NO: 199 - protein, 109 aa, Homo sapiens
APPVAGPSVFLFPPKPKDTLMISRTPEVTCVVVDVSHEDPEVQFNWYVDGVEVHNAKTKPREEQFNSTFRVVSVLTVVHQDWLNGKEYKCKVSNKGLPAPIEKTISKTK

SEQ ID NO: 200 - protein, 110 aa, Homo sapiens
APELLGGPSVFLFPPKPKDTLMISRTPEVTCVVVDVSHEDPEVQFKWYVDGVEVHNAKTKPREEQYNSTFRVVSVLTVLHQDWLNGKEYKCKVSNKALPAPIEKTISKTK

SEQ ID NO: 201 - protein, 110 aa, Homo sapiens
APEFLGGPSVFLFPPKPKDTLMISRTPEVTCVVVDVSQEDPEVQFNWYVDGVEVHNAKTKPREEQFNSTYRVVSVLTVLHQDWLNGKEYKCKVSNKGLPSSIEKTISKAK

SEQ ID NO: 202 - protein, 105 aa, Artificial Sequence
  Altered human Ck region + T70E, N29A, N30A, V55A
TVAAPSVFIFPPSDEQLKSGTASVVCLLAAFYPREAKVQWKVDNALQSGNSQESATEQDSKDSTYSLSSELTLSKADYEKHKVYACEVTHQGLSSPVTKSFNRGE

SEQ ID NO: 203 - protein, 112 aa, Homo sapiens
VIAELPPKVSVFVPPRDGFFGNPRKSKLICQATGFSPRQIQVSWLREGKQVGSGVTTDQVQAEAKESGPTTYKVTSTLTIKESDWLGQSMFTCRVDHRGLTFQQNASSMCVP

SEQ ID NO: 204 - protein, 131 aa, Homo sapiens
GNTFRPEVHLLPPPSEELALNELVTLTCLARGFSPKDVLVRWLQGSQELPREKYLTWASRQEPSQGTTTFAVTSILRVAAEDWKKGDTFSCMVGHEALPLAFTQKTIDRLAGKPTHVNVSVVMAEVDGTCY

SEQ ID NO: 205 - protein, 131 aa, Homo sapiens; identical to SEQ ID NO: 204

SEQ ID NO: 206 - protein, 117 aa, Homo sapiens
AAQAPVKLSLNLLASSDPPEAASWLLCEVSGFSPPNILLMWLEDQREVNTSGFAPARPPPQPRSTTFWAWSVLRVPAPPSPQPATYTCVVSHEDSRTLLNASRSLEVSYVTDHGPMK

SEQ ID NO: 207 - protein, 108 aa, Homo sapiens
DSNPRGVSAYLSRPSPFDLFIRKSPTITCLVVDLAPSKGTVNLTWSRASGKPVNHSTRKEEKQRNGTLTVTSTLPVGTRDWIEGETYQCRVTHPHLPRALMRSTTKTS

SEQ ID NO: 208 - protein, 107 aa, Homo sapiens
GQPREPQVYTLPPSREEMTKNQVSLTCLVKGFYPSDIAVEWESNGQPENNYKTTPPMLDSDGSFFLYSKLTVDKSRWQQGNVFSCSVMHEALHNHYTQKSLSLSPGK

SEQ ID NO: 209 - protein, 107 aa, Homo sapiens
GQPREPQVYTLPPSREEMTKNQVSLTCLVKGFYPSDIAVEWESSGQPENNYNTTPPMLDSDGSFFLYSKLTVDKSRWQQGNIFSCSVMHEALHNRFTQKSLSLSPGK

SEQ ID NO: 210 - protein, 107 aa, Homo sapiens
GQPREPQVYTLPPSQEEMTKNQVSLTCLVKGFYPSDIAVEWESNGQPENNYKTTPPVLDSDGSFFLYSRLTVDKSRWQEGNVFSCSVMHEALHNHYTQKSLSLSLGK

SEQ ID NO: 211 - protein, 7 aa, Homo sapiens
ERKCCVE

SEQ ID NO: 212 - protein, 106 aa, Homo sapiens
DQDTAIRVFAIPPSFASIFLTKSTKLTCLVTDLTTYDSVTISWTRQNGEAVKTHTNISESHPNATFSAVGEASICEDDWNSGERFTCTVTHTDLPSPLKQTISRPK

SEQ ID NO: 213 - protein, 110 aa, Homo sapiens
GPRAAPEVYAFATPEWPGSRDKRTLACLIQNFMPEDISVQWLHNEVQLPDARHSTTQPRKTKGSGFFVFSRLEVTRAEWEQKDEFICRAVHEAASPSQTVQRAVSVNPGK

SEQ ID NO: 214 - protein, 131 aa, Homo sapiens
GVALHRPDVYLLPPAREQLNLRESATITCLVTGFSPADVFVQWMQRGQPLSPEKYVTSAPMPEPQAPGRYFAHSILTVSEEEWNTGETYTCVVAHEALPNRVTERTVDKSTGKPTLYNVSLVMSDTAGTCY

SEQ ID NO: 215 - protein, 19 aa, Homo sapiens
VPSTPPTPSPSTPPTPSPS

SEQ ID NO: 216 - protein, 6 aa, Homo sapiens
VPPPPP

SEQ ID NO: 217 - protein, 58 aa, Homo sapiens
ESPKAQASSVPTAQPQAEGSLAKATTAPATTRNTGRGGEEKKKEKEKEEQEERETKTP

SEQ ID NO: 218 - protein, 15 aa, Homo sapiens
EPKSCDKTHTCPPCP

SEQ ID NO: 219 - protein, 12 aa, Homo sapiens
ERKCCVECPPCP

SEQ ID NO: 220 - protein, 62 aa, Homo sapiens
ELKTPLGDTTHTCPRCPEPKSCDTPPPCPRCPEPKSCDTPPPCPRCPEPKSCDTPPPCPRCP

SEQ ID NO: 221 - protein, 12 aa, Homo sapiens
ESKYGPPCPSCP

SEQ ID NO: 222 - protein, 34 aa, Homo sapiens
ESPKAQASSVPTAQPQAEGSLAKATTAPATTRNT

SEQ ID NO: 223 - protein, 106 aa, Homo sapiens
GQPKAAPSVTLFPPSSEELQANKATLVCLISDFYPGAVTVAWKADSSPVKAGVETTTPSKQSNNKYAASSYLSLTPEQWKSHRSYSCQVTHEGSTVEKTVAPTECS

SEQ ID NO: 224 - protein, 106 aa, Homo sapiens
GQPKAAPSVTLFPPSSEELQANKATLVCLISDFYPGAVTVAWKADSSPVKAGVETTTPSKQSNNKYAASSYLSLTPEQWKSHKSYSCQVTHEGSTVEKTVAPTECS

SEQ ID NO: 225 - protein, 106 aa, Homo sapiens
GQPKAAPSVTLFPPSSEELQANKATLVCLISDFYPGAVKVAWKADGSPVNTGVETTTPSKQSNNKYAASSYLSLTPEQWKSHRSYSCQVTHEGSTVEKTVAPAECS

SEQ ID NO: 226 - protein, 106 aa, Homo sapiens
GQPKAAPSVTLFPPSSEELQANKATLVCLVSDFYPGAVTVAWKADGSPVKVGVETTKPSKQSNNKYAASSYLSLTPEQWKSHRSYSCRVTHEGSTVEKTVAPAECS

SEQ ID NO: 227 - protein, 10 aa, Homo sapiens
EPKSCDKTHT

SEQ ID NO: 228 - protein, 5 aa, Homo sapiens
CPPCP

SEQ ID NO: 229 - protein, 15 aa, Artificial Sequence
  Altered human IgG1 hinge (SCC-P)
EPKSSDKTHTCPPCP

SEQ ID NO: 230 - protein, 15 aa, Artificial Sequence
  Altered human IgG1 hinge (SSC-P)
EPKSSDKTHTSPPCP

SEQ ID NO: 231 - protein, 15 aa, Artificial Sequence
  Altered human IgG1 hinge (SSS-P)
EPKSSDKTHTSPPSP

SEQ ID NO: 232 - protein, 15 aa, Artificial Sequence
  Altered human IgG1 hinge (CSC-P)
EPKSCDKTHTSPPCP

SEQ ID NO: 233 - protein, 15 aa, Artificial Sequence
  Altered human IgG1 hinge (CSS-P)
EPKSCDKTHTSPPSP

SEQ ID NO: 234 - protein, 15 aa, Artificial Sequence
  Altered human IgG1 hinge (CCS-P)
EPKSCDKTHTCPPSP

SEQ ID NO: 235 - protein, 15 aa, Artificial Sequence
  Altered human IgG1 hinge (SCC-S)
EPKSSDKTHTCPPCS

SEQ ID NO: 236 - protein, 15 aa, Artificial Sequence
  Altered human IgG1 hinge (SSC-S)
EPKSSDKTHTSPPCS

SEQ ID NO: 237 - protein, 15 aa, Artificial Sequence
  Altered human IgG1 hinge (SSS-S)
EPKSSDKTHTSPPSS

SEQ ID NO: 238 - protein, 15 aa, Artificial Sequence
  Altered human IgG1 hinge (CSC-S)
EPKSCDKTHTSPPCS

SEQ ID NO: 239 - protein, 15 aa, Artificial Sequence
  Altered human IgG1 hinge (CSS-S)
EPKSCDKTHTSPPSS

SEQ ID NO: 240 - protein, 15 aa, Artificial Sequence
  Altered human IgG1 hinge (CCS-S)
EPKSCDKTHTCPPSS

SEQ ID NO: 241 - protein, 12 aa, Artificial Sequence
  Stalk  region of CD69
QYNCPGQYTFSM

SEQ ID NO: 242 - protein, 11 aa, Artificial Sequence
  Stalk  region of CD72
PFFTCGSADTC

SEQ ID NO: 243 - protein, 18 aa, Artificial Sequence
  Stalk  region of CD94
EPAFTPGPNIELQKDSDC

SEQ ID NO: 244 - protein, 18 aa, Artificial Sequence
  Stalk  region of NKG2A
QRHNNSSLNTRTQKARHC

SEQ ID NO: 245 - protein, 12 aa, Homo sapiens
ELKTPLGDTTHT

SEQ ID NO: 246 - protein, 10 aa, Homo sapiens
EPKSCDTPPP

SEQ ID NO: 247 - protein, 7 aa, Homo sapiens
ESKYGPP

SEQ ID NO: 248 - protein, 5 aa, Homo sapiens
CPRCP

SEQ ID NO: 249 - protein, 5 aa, Homo sapiens
CPSCP

SEQ ID NO: 250 - protein, 17 aa, Homo sapiens
ELKTPLGDTTHTCPRCP

SEQ ID NO: 251 - protein, 15 aa, Homo sapiens
EPKSCDTPPPCPRCP

SEQ ID NO: 252 - protein, 24 aa, Homo sapiens
GRGGEEKKKEKEKEEQEERETKTP

SEQ ID NO: 253 - protein, 107 aa, Homo sapiens
VCSRDFTPPTVKILQSSSDGGGHFPPTIQLLCLVSGYTPGTINITWLEDGQVMDVDLSTASTTQEGELASTQSELTLSQKHWLSDRTYTCQVTYQGHTFEDSTKKCA

SEQ ID NO: 254 - protein, 112 aa, Homo sapiens; identical to SEQ ID NO: 203

SEQ ID NO: 255 - protein, 107 aa, Artificial Sequence
  Altered human CH2 upper hinge like sequence of IgE
VCSRDFTPPTVKILQSSSDGGGHFPPTIQLLCLVSGYTPGTINITWLEDGQVMDVDLSTASTTQEGELASTQSELTLSQKHWLSDRTYTCQVTYQGHTFEDSTKKSA

SEQ ID NO: 256 - protein, 268 aa, Artificial Sequence
  5D5 scFv (VLVH)
MEAPAQLLFLLLLWLPDTTGDFMMSQSPSSLTVSVGEKVTVSCKSSQSLLYTSSQKNYLAWYQQKPGQSPKLLIYWASTRESGVPDRFTGSGSGTDFTLTITSVKADDLAVYYCQQYYAYPWTFGGGTKLELKGGGGSGGGGSGGGGSQVQLQQSGPELVRPGASVKMSCRASGYTFTSYWLHWVKQRPGQGLEWIGMIDPSNSDTRFNPNFKDKATLNVDRSSNTAYMLLSSLTSADSAVYYCATYGSYVSPLDYWGQGTSVTVSSS

SEQ ID NO: 257 - protein, 248 aa, Artificial Sequence
  5D5 scFv (VLVH) mature protein without the signal peptide
DFMMSQSPSSLTVSVGEKVTVSCKSSQSLLYTSSQKNYLAWYQQKPGQSPKLLIYWASTRESGVPDRFTGSGSGTDFTLTITSVKADDLAVYYCQQYYAYPWTFGGGTKLELKGGGGSGGGGSGGGGSQVQLQQSGPELVRPGASVKMSCRASGYTFTSYWLHWVKQRPGQGLEWIGMIDPSNSDTRFNPNFKDKATLNVDRSSNTAYMLLSSLTSADSAVYYCATYGSYVSPLDYWGQGTSVTVSSS

SEQ ID NO: 258 - protein, 120 aa, Artificial Sequence
  5D5 VH
QVQLQQSGPELVRPGASVKMSCRASGYTFTSYWLHWVKQRPGQGLEWIGMIDPSNSDTRFNPNFKDKATLNVDRSSNTAYMLLSSLTSADSAVYYCATYGSYVSPLDYWGQGTSVTVSSS

SEQ ID NO: 259 - protein, 113 aa, Artificial Sequence
  5D5 VL
DFMMSQSPSSLTVSVGEKVTVSCKSSQSLLYTSSQKNYLAWYQQKPGQSPKLLIYWASTRESGVPDRFTGSGSGTDFTLTITSVKADDLAVYYCQQYYAYPWTFGGGTKLELK

SEQ ID NO: 260 - DNA, 792 bp, Artificial Sequence
  4C04 anti-Ron scFv with signal peptide and junction amino acids SSS at carboxy-terminus
atggaagcaccagcgcagcttctcttcctcctgctactctggctcccagataccaccggtgacattcagatgacccagtctcctgcctcccagtctgcatctctgggagaaagtgtcaccatcacatgcctggcaagtcagaccattggtacatggttagcatggtatcagcagaaaccagggaaatctcctcagctcctgatttatgctgcaaccagcttggcagatggggtcccatcaaggttcagtgctagtggatctggcacaaaattttctttcaagatcgacagcctacagtctgaagattttgtaagttattactgtcaacaactttacaatactccgtggacgttcggtggaggcaccaagctggaaatcaaaggtggcggtggctctggcggaggtggatccggtggcggcggctctcagatccagctgcagcagtctggacctgagctggtgaagcctgggacttcagtgaagatatcctgcaaggcttctgactacacactcactgacttctatatgaactgggtgaggcagaagcctggacagggacttgagtggattgggaggatttatcctggaaccgataaaactagatacaatgagaaattcagggacaaggccatactgaccgtggacacgtcctccagcacagcctacatgcagctcagcagcctgacatcagaggacactgctgtctatttctgtgcaagatccgcctactatggtaactacgttgctatggactactggggtcaaggaacctcagtcaccgtctcctcgagc

SEQ ID NO: 261 - protein, 244 aa, Artificial Sequence
  4C04 anti-Ron scFv with signal peptide and junction amino acids SSS at carboxy-terminus
DIQMTQSPASQSASLGESVTITCLASQTIGTWLAWYQQKPGKSPQLLIYAATSLADGVPSRFSASGSGTKFSFKIDSLQSEDFVSYYCQQLYNTPWTFGGGTKLEIKGGGGSGGGGSGGGGSQIQLQQSGPELVKPGTSVKISCKASDYTLTDFYMNWVRQKPGQGLEWIGRIYPGTDKTRYNEKFRDKAILTVDTSSSTAYMQLSSLTSEDTAVYFCARSAYYGNYVAMDYWGQGTSVTVSSS

SEQ ID NO: 262 - DNA, 2115 bp, Artificial Sequence
  4C04 anti-Ron single chain polypeptide (4C04 scFv-CH1-CH2-CH3-Ck with signal peptide)
atggaagcaccagcgcagcttctcttcctcctgctactctggctcccagataccaccggtgacattcagatgacccagtctcctgcctcccagtctgcatctctgggagaaagtgtcaccatcacatgcctggcaagtcagaccattggtacatggttagcatggtatcagcagaaaccagggaaatctcctcagctcctgatttatgctgcaaccagcttggcagatggggtcccatcaaggttcagtgctagtggatctggcacaaaattttctttcaagatcgacagcctacagtctgaagattttgtaagttattactgtcaacaactttacaatactccgtggacgttcggtggaggcaccaagctggaaatcaaaggtggcggtggctctggcggaggtggatccggtggcggcggctctcagatccagctgcagcagtctggacctgagctggtgaagcctgggacttcagtgaagatatcctgcaaggcttctgactacacactcactgacttctatatgaactgggtgaggcagaagcctggacagggacttgagtggattgggaggatttatcctggaaccgataaaactagatacaatgagaaattcagggacaaggccatactgaccgtggacacgtcctccagcacagcctacatgcagctcagcagcctgacatcagaggacactgctgtctatttctgtgcaagatccgcctactatggtaactacgttgctatggactactggggtcaaggaacctcagtcaccgtctcctcgagcgcctccaccaagggcccatcggtcttccccctggcaccctcctccaagagcacctctgggggcacagcggccctgggctgcctggtcaaggactacttccccgagccggtgacggtgtcgtggaactcaggcgccctgaccagcggcgtgcacaccttcccggctgtcctacagtcctcaggactctactccctcagcagcgtggtgaccgtgccctccagcagcttgggcacccagacctacatctgcaacgtgaatcacaagcccagcaacaccaaggtggacaagaaagttcgtacggagcccaaatcttctgacaaaactcacacatgcccaccgtgcccatccggagcacctgaactcctgggtggaccgtcagtcttcctcttccccccaaaacccaaggacaccctcatgatctcccggacccctgaggtcacatgcgtggtggtggacgtgagccacgaagaccctgaggtcaagttcaactggtacgtggacggcgtggaggtgcataatgccaagacaaagccgcgggaggagcagtacaacagcacgtaccgtgtggtcagcgtcctcaccgtcctgcaccaggactggctgaatggcaaggagtacaagtgcaaggtctccaacaaagccctcccagcccccatcgagaaaaccatctccaaagccaaagggcagccccgagaaccacaggtgtacaccctgcccccatcccgggatgagctgaccaagaaccaggtcagcctgacctgcctggtcaaaggcttctatccaagcgacatcgccgtggagtgggagagcaatgggcagccggagaacaactacaagaccacgcctcccgtgctggactccgacggctccttcttcctctacagcaagctcaccgtggacaagagcaggtggcagcaggggaacgtcttctcatgctccgtgatgcatgaggctctgcacaaccactacacgcagaagagcctctccctgtctccgggtaaatctagaactgtggctgcaccatctgtcttcatcttcccgccatctgatgagcagttgaaatctggaactgcctctgttgtgtgcctgctgaataacttctatcccagagaggccaaagtacagtggaaggtggataacgccctccaatcgggtaactcccaggagagtgtcacagagcaggacagcaaggacagcacctacagcctcagcagcaccctgacgctgagcaaagcagactacgagaaacacaaagtctacgcctgcgaagtcacccatcagggcctgagctcgcccgtcacaaagagcttcaacaggggagag

SEQ ID NO: 263 - protein, 685 aa, Artificial Sequence
  4C04 anti-Ron single chain polypeptide (4C04 scFv-CH1-CH2-CH3-Ck mature protein without the signal peptide)
DIQMTQSPASQSASLGESVTITCLASQTIGTWLAWYQQKPGKSPQLLIYAATSLADGVPSRFSASGSGTKFSFKIDSLQSEDFVSYYCQQLYNTPWTFGGGTKLEIKGGGGSGGGGSGGGGSQIQLQQSGPELVKPGTSVKISCKASDYTLTDFYMNWVRQKPGQGLEWIGRIYPGTDKTRYNEKFRDKAILTVDTSSSTAYMQLSSLTSEDTAVYFCARSAYYGNYVAMDYWGQGTSVTVSSSASTKGPSVFPLAPSSKSTSGGTAALGCLVKDYFPEPVTVSWNSGALTSGVHTFPAVLQSSGLYSLSSVVTVPSSSLGTQTYICNVNHKPSNTKVDKKVRTEPKSSDKTHTCPPCPSGAPELLGGPSVFLFPPKPKDTLMISRTPEVTCVVVDVSHEDPEVKFNWYVDGVEVHNAKTKPREEQYNSTYRVVSVLTVLHQDWLNGKEYKCKVSNKALPAPIEKTISKAKGQPREPQVYTLPPSRDELTKNQVSLTCLVKGFYPSDIAVEWESNGQPENNYKTTPPVLDSDGSFFLYSKLTVDKSRWQQGNVFSCSVMHEALHNHYTQKSLSLSPGKSRTVAAPSVFIFPPSDEQLKSGTASVVCLLNNFYPREAKVQWKVDNALQSGNSQESVTEQDSKDSTYSLSSTLTLSKADYEKHKVYACEVTHQGLSSPVTKSFNRGE

SEQ ID NO: 264 - DNA, 780 bp, Artificial Sequence
  11H09 anti-RON scFv with signal peptide and junction amino acids SSS at carboxy-terminus)
atggaagcaccagcgcagcttctcttcctcctgctactctggctcccagataccaccggtgacatccagatgacccagtctccatcctccttatctgcctctctgggagaaagagtcagtctcacttgtcgggcaagtcaggacattggtagtagcttaagctggcttcagcaggaaccagatggtactattaaacgcctgatctactccacatccagtttagattctggtgtccccaaaaggttcagtggcagtaggtcggggtcagattattctctcaccatcagcagccttgagtctgaagattttgtagactattactgtctacaatatgctagttctccgtggacgttcggtggaggcaccaagctggaaatcaaaggtggcggtggctctggcggaggtggatccggtggcggcggctctcaggtccagcttcagcagtctggggctgaactggcaaaacctggggcctcagtgaagatgtcctgcaagtcttctggctacacctttactagctactggatacactgggtaaaagagaggcctggacagggtctggaatggattggatacatttatcctaccactggttatactgagtccaatcagaagttcaaggacaaggccacattgactgcagacaaatcctccagcacagcctacatgcaactgagcagcctgacatctgaggactctgcagtctattactgtttcctactacggccctggtacttcgatgtctggggcgcagggaccacggtcaccgtctcctcgagc

SEQ ID NO: 265 - protein, 240 aa, Artificial Sequence
  11H09 anti-RON scFv mature protein without the signal peptide but with junction amino acids SSS at carboxy-terminus
DIQMTQSPSSLSASLGERVSLTCRASQDIGSSLSWLQQEPDGTIKRLIYSTSSLDSGVPKRFSGSRSGSDYSLTISSLESEDFVDYYCLQYASSPWTFGGGTKLEIKGGGGSGGGGSGGGGSQVQLQQSGAELAKPGASVKMSCKSSGYTFTSYWIHWVKERPGQGLEWIGYIYPTTGYTESNQKFKDKATLTADKSSSTAYMQLSSLTSEDSAVYYCFLLRPWYFDVWGAGTTVTVSSS

SEQ ID NO: 266 - DNA, 2103 bp, Artificial Sequence
  11H09 anti-RON single chain polypeptide (11H09 scFv-CH1-CH2-CH3-Ck with signal peptide)
atggaagcaccagcgcagcttctcttcctcctgctactctggctcccagataccaccggtgacatccagatgacccagtctccatcctccttatctgcctctctgggagaaagagtcagtctcacttgtcgggcaagtcaggacattggtagtagcttaagctggcttcagcaggaaccagatggtactattaaacgcctgatctactccacatccagtttagattctggtgtccccaaaaggttcagtggcagtaggtcggggtcagattattctctcaccatcagcagccttgagtctgaagattttgtagactattactgtctacaatatgctagttctccgtggacgttcggtggaggcaccaagctggaaatcaaaggtggcggtggctctggcggaggtggatccggtggcggcggctctcaggtccagcttcagcagtctggggctgaactggcaaaacctggggcctcagtgaagatgtcctgcaagtcttctggctacacctttactagctactggatacactgggtaaaagagaggcctggacagggtctggaatggattggatacatttatcctaccactggttatactgagtccaatcagaagttcaaggacaaggccacattgactgcagacaaatcctccagcacagcctacatgcaactgagcagcctgacatctgaggactctgcagtctattactgtttcctactacggccctggtacttcgatgtctggggcgcagggaccacggtcaccgtctcctcgagcgcctccaccaagggcccatcggtcttccccctggcaccctcctccaagagcacctctgggggcacagcggccctgggctgcctggtcaaggactacttccccgagccggtgacggtgtcgtggaactcaggcgccctgaccagcggcgtgcacaccttcccggctgtcctacagtcctcaggactctactccctcagcagcgtggtgaccgtgccctccagcagcttgggcacccagacctacatctgcaacgtgaatcacaagcccagcaacaccaaggtggacaagaaagttcgtacggagcccaaatcttctgacaaaactcacacatgcccaccgtgcccatccggagcacctgaactcctgggtggaccgtcagtcttcctcttccccccaaaacccaaggacaccctcatgatctcccggacccctgaggtcacatgcgtggtggtggacgtgagccacgaagaccctgaggtcaagttcaactggtacgtggacggcgtggaggtgcataatgccaagacaaagccgcgggaggagcagtacaacagcacgtaccgtgtggtcagcgtcctcaccgtcctgcaccaggactggctgaatggcaaggagtacaagtgcaaggtctccaacaaagccctcccagcccccatcgagaaaaccatctccaaagccaaagggcagccccgagaaccacaggtgtacaccctgcccccatcccgggatgagctgaccaagaaccaggtcagcctgacctgcctggtcaaaggcttctatccaagcgacatcgccgtggagtgggagagcaatgggcagccggagaacaactacaagaccacgcctcccgtgctggactccgacggctccttcttcctctacagcaagctcaccgtggacaagagcaggtggcagcaggggaacgtcttctcatgctccgtgatgcatgaggctctgcacaaccactacacgcagaagagcctctccctgtctccgggtaaatctagaactgtggctgcaccatctgtcttcatcttcccgccatctgatgagcagttgaaatctggaactgcctctgttgtgtgcctgctgaataacttctatcccagagaggccaaagtacagtggaaggtggataacgccctccaatcgggtaactcccaggagagtgtcacagagcaggacagcaaggacagcacctacagcctcagcagcaccctgacgctgagcaaagcagactacgagaaacacaaagtctacgcctgcgaagtcacccatcagggcctgagctcgcccgtcacaaagagcttcaacaggggagag

SEQ ID NO: 267 - protein, 681 aa, Artificial Sequence
  11H09 anti-RON single chain polypeptide (11H09 scFv-CH1-CH2-CH3-Ck mature protein without the signal peptide)
DIQMTQSPSSLSASLGERVSLTCRASQDIGSSLSWLQQEPDGTIKRLIYSTSSLDSGVPKRFSGSRSGSDYSLTISSLESEDFVDYYCLQYASSPWTFGGGTKLEIKGGGGSGGGGSGGGGSQVQLQQSGAELAKPGASVKMSCKSSGYTFTSYWIHWVKERPGQGLEWIGYIYPTTGYTESNQKFKDKATLTADKSSSTAYMQLSSLTSEDSAVYYCFLLRPWYFDVWGAGTTVTVSSSASTKGPSVFPLAPSSKSTSGGTAALGCLVKDYFPEPVTVSWNSGALTSGVHTFPAVLQSSGLYSLSSVVTVPSSSLGTQTYICNVNHKPSNTKVDKKVRTEPKSSDKTHTCPPCPSGAPELLGGPSVFLFPPKPKDTLMISRTPEVTCVVVDVSHEDPEVKFNWYVDGVEVHNAKTKPREEQYNSTYRVVSVLTVLHQDWLNGKEYKCKVSNKALPAPIEKTISKAKGQPREPQVYTLPPSRDELTKNQVSLTCLVKGFYPSDIAVEWESNGQPENNYKTTPPVLDSDGSFFLYSKLTVDKSRWQQGNVFSCSVMHEALHNHYTQKSLSLSPGKSRTVAAPSVFIFPPSDEQLKSGTASVVCLLNNFYPREAKVQWKVDNALQSGNSQESVTEQDSKDSTYSLSSTLTLSKADYEKHKVYACEVTHQGLSSPVTKSFNRGE

SEQ ID NO: 268 - protein, 7 aa, Artificial Sequence
  Anti-c-Met Light Chain Complementarity Determining Region
GKNNRPS

SEQ ID NO: 269 - protein, 11 aa, Artificial Sequence
  Anti-c-Met Light Chain Complementarity Determining Region
NSRDSSGNLVF

SEQ ID NO: 270 - protein, 11 aa, Artificial Sequence
  Anti-c-Met Light Chain Complementarity Determining Region
SGDKLGDKYAS

SEQ ID NO: 271 - protein, 7 aa, Artificial Sequence
  Anti-c-Met Light Chain Complementarity Determining Region
QDRKRPS

SEQ ID NO: 272 - protein, 9 aa, Artificial Sequence
  Anti-c-Met Light Chain Complementarity Determining Region
QAWDSNTVV

SEQ ID NO: 273 - protein, 13 aa, Artificial Sequence
  Anti-c-Met Light Chain Complementarity Determining Region
SGSSSNIGSDYVH

SEQ ID NO: 274 - protein, 7 aa, Artificial Sequence
  Anti-c-Met Light Chain Complementarity Determining Region
RNNKRPS

SEQ ID NO: 275 - protein, 11 aa, Artificial Sequence
  Anti-c-Met Light Chain Complementarity Determining Region
AAWDDSLNGWV

SEQ ID NO: 276 - protein, 11 aa, Artificial Sequence
  Anti-c-Met Light Chain Complementarity Determining Region
SGDKLGDKYAS

SEQ ID NO: 277 - protein, 7 aa, Artificial Sequence
  Anti-c-Met Light Chain Complementarity Determining Region
EDNKRPS

SEQ ID NO: 278 - protein, 9 aa, Artificial Sequence
  Anti-c-Met Light Chain Complementarity Determining Region
QTWASGTVL

SEQ ID NO: 279 - protein, 13 aa, Artificial Sequence
  Anti-c-Met Light Chain Complementarity Determining Region
SGSSSNIGSNTVN

SEQ ID NO: 280 - protein, 7 aa, Artificial Sequence
  Anti-c-Met Light Chain Complementarity Determining Region
ANNQRPS

SEQ ID NO: 281 - protein, 11 aa, Artificial Sequence
  Anti-c-Met Light Chain Complementarity Determining Region
AVWDDSLNAWV

SEQ ID NO: 282 - protein, 11 aa, Artificial Sequence
  Anti-c-Met Light Chain Complementarity Determining Region
SGDKLENKYTS

SEQ ID NO: 283 - protein, 7 aa, Artificial Sequence
  Anti-c-Met Light Chain Complementarity Determining Region
EDIERPS

SEQ ID NO: 284 - protein, 10 aa, Artificial Sequence
  Anti-c-Met Light Chain Complementarity Determining Region
QAWDSNIAVV

SEQ ID NO: 285 - protein, 13 aa, Artificial Sequence
  Anti-c-Met Light Chain Complementarity Determining Region
SGGNSNIGSHYVY

SEQ ID NO: 286 - protein, 7 aa, Artificial Sequence
  Anti-c-Met Light Chain Complementarity Determining Region
RDNQRPS

SEQ ID NO: 287 - protein, 11 aa, Artificial Sequence
  Anti-c-Met Light Chain Complementarity Determining Region
AAWDDSLGGPV

SEQ ID NO: 288 - protein, 13 aa, Artificial Sequence
  Anti-c-Met Light Chain Complementarity Determining Region
SGSSSNIGRNAVN

SEQ ID NO: 289 - protein, 7 aa, Artificial Sequence
  Anti-c-Met Light Chain Complementarity Determining Region
NNNQRPS

SEQ ID NO: 290 - protein, 11 aa, Artificial Sequence
  Anti-c-Met Light Chain Complementarity Determining Region
GGNNIGDKSVH

SEQ ID NO: 291 - protein, 7 aa, Artificial Sequence
  Anti-c-Met Light Chain Complementarity Determining Region
EDKNRPA

SEQ ID NO: 292 - protein, 11 aa, Artificial Sequence
  Anti-c-Met Light Chain Complementarity Determining Region
QVWDSSTDHHV

SEQ ID NO: 293 - protein, 11 aa, Artificial Sequence
  Anti-c-Met Light Chain Complementarity Determining Region
GGNNIGTTSVQ

SEQ ID NO: 294 - protein, 7 aa, Artificial Sequence
  Anti-c-Met Light Chain Complementarity Determining Region
YGSDRPS

SEQ ID NO: 295 - protein, 9 aa, Artificial Sequence
  Anti-c-Met Light Chain Complementarity Determining Region
QTWVKGAGI

SEQ ID NO: 296 - protein, 11 aa, Artificial Sequence
  Anti-c-Met Light Chain Complementarity Determining Region
RASQSIRNYLN

SEQ ID NO: 297 - protein, 7 aa, Artificial Sequence
  Anti-c-Met Light Chain Complementarity Determining Region
AASSLQS

SEQ ID NO: 298 - protein, 9 aa, Artificial Sequence
  Anti-c-Met Light Chain Complementarity Determining Region
QQSYVTPLT

SEQ ID NO: 299 - protein, 10 aa, Artificial Sequence
  Anti-c-Met Light Chain Complementarity Determining Region
RASQSVNSLN

SEQ ID NO: 300 - protein, 7 aa, Artificial Sequence
  Anti-c-Met Light Chain Complementarity Determining Region
GISSLRR

SEQ ID NO: 301 - protein, 9 aa, Artificial Sequence
  Anti-c-Met Light Chain Complementarity Determining Region
QQSHSVPLT

SEQ ID NO: 302 - protein, 11 aa, Artificial Sequence
  Anti-c-Met Light Chain Complementarity Determining Region
RASQGIRNDLG

SEQ ID NO: 303 - protein, 7 aa, Artificial Sequence
  Anti-c-Met Light Chain Complementarity Determining Region
AASSLQS

SEQ ID NO: 304 - protein, 9 aa, Artificial Sequence
  Anti-c-Met Light Chain Complementarity Determining Region
LQHNSYPPT

SEQ ID NO: 305 - protein, 11 aa, Artificial Sequence
  Anti-c-Met Light Chain Complementarity Determining Region
RASQSVSSDLA

SEQ ID NO: 306 - protein, 7 aa, Artificial Sequence
  Anti-c-Met Light Chain Complementarity Determining Region
DAFKRAT

SEQ ID NO: 307 - protein, 9 aa, Artificial Sequence
  Anti-c-Met Light Chain Complementarity Determining Region
QQRSNWPLT

SEQ ID NO: 308 - protein, 11 aa, Artificial Sequence
  Anti-c-Met Light Chain Complementarity Determining Region
RASQSVSSYLA

SEQ ID NO: 309 - protein, 7 aa, Artificial Sequence
  Anti-c-Met Light Chain Complementarity Determining Region
DASNRAT

SEQ ID NO: 310 - protein, 9 aa, Artificial Sequence
  Anti-c-Met Light Chain Complementarity Determining Region
QQRSNWPLT

SEQ ID NO: 311 - protein, 16 aa, Artificial Sequence
  Anti-c-Met Light Chain Complementarity Determining Region
RSSQSLLYSNGYNYLD

SEQ ID NO: 312 - protein, 7 aa, Artificial Sequence
  Anti-c-Met Light Chain Complementarity Determining Region
LGSNRAS

SEQ ID NO: 313 - protein, 9 aa, Artificial Sequence
  Anti-c-Met Light Chain Complementarity Determining Region
MQALQSPLT

SEQ ID NO: 314 - protein, 12 aa, Artificial Sequence
  Anti-c-Met Light Chain Complementarity Determining Region
RASQSVSSSYLA

SEQ ID NO: 315 - protein, 7 aa, Artificial Sequence
  Anti-c-Met Light Chain Complementarity Determining Region
GASSRAT

SEQ ID NO: 316 - protein, 5 aa, Artificial Sequence
  Anti-c-Met Light Chain Complementarity Determining Region
QQRSI

SEQ ID NO: 317 - protein, 11 aa, Artificial Sequence
  Anti-c-Met Light Chain Complementarity Determining Region
RTSQYIRTNLA

SEQ ID NO: 318 - protein, 7 aa, Artificial Sequence
  Anti-c-Met Light Chain Complementarity Determining Region
DGSNRAT

SEQ ID NO: 319 - protein, 9 aa, Artificial Sequence
  Anti-c-Met Light Chain Complementarity Determining Region
QQRSNWPLT

SEQ ID NO: 320 - protein, 11 aa, Artificial Sequence
  Anti-c-Met Light Chain Complementarity Determining Region
RTSQQIMTYLN

SEQ ID NO: 321 - protein, 7 aa, Artificial Sequence
  Anti-c-Met Light Chain Complementarity Determining Region
VASRLQG

SEQ ID NO: 322 - protein, 9 aa, Artificial Sequence
  Anti-c-Met Light Chain Complementarity Determining Region
QQSFWTPLT

SEQ ID NO: 323-332 - skipped (10 entries)

SEQ ID NO: 333 - protein, 11 aa, Artificial Sequence
  Anti-c-Met Light Chain Complementarity Determining Region
QASQDIDNYLN

SEQ ID NO: 334 - protein, 7 aa, Artificial Sequence
  Anti-c-Met Light Chain Complementarity Determining Region
DAYNLKA

SEQ ID NO: 335 - protein, 9 aa, Artificial Sequence
  Anti-c-Met Light Chain Complementarity Determining Region
QVFDDLSVT

SEQ ID NO: 336 - protein, 11 aa, Artificial Sequence
  Anti-c-Met Light Chain Complementarity Determining Region
RASQGIKNDLG

SEQ ID NO: 337 - protein, 7 aa, Artificial Sequence
  Anti-c-Met Light Chain Complementarity Determining Region
AASSLQS

SEQ ID NO: 338 - protein, 9 aa, Artificial Sequence
  Anti-c-Met Light Chain Complementarity Determining Region
QQSNSFPLT

SEQ ID NO: 339 - protein, 11 aa, Artificial Sequence
  Anti-c-Met Light Chain Complementarity Determining Region
QASHDINNYLN

SEQ ID NO: 340 - protein, 7 aa, Artificial Sequence
  Anti-c-Met Light Chain Complementarity Determining Region
DASNLQS

SEQ ID NO: 341 - protein, 9 aa, Artificial Sequence
  Anti-c-Met Light Chain Complementarity Determining Region
QQYDTLPVT

SEQ ID NO: 342 - protein, 13 aa, Artificial Sequence
  Anti-c-Met Light Chain Complementarity Determining Region
AGSSSNIGSNSVY

SEQ ID NO: 343 - protein, 7 aa, Artificial Sequence
  Anti-c-Met Light Chain Complementarity Determining Region
SNNKRPS

SEQ ID NO: 344 - protein, 11 aa, Artificial Sequence
  Anti-c-Met Light Chain Complementarity Determining Region
AAWDDSLRSVV

SEQ ID NO: 345 - protein, 13 aa, Artificial Sequence
  Anti-c-Met Light Chain Complementarity Determining Region
SGSSSTIGSNFVN

SEQ ID NO: 346 - protein, 7 aa, Artificial Sequence
  Anti-c-Met Light Chain Complementarity Determining Region
TNNQRPS

SEQ ID NO: 347 - protein, 11 aa, Artificial Sequence
  Anti-c-Met Light Chain Complementarity Determining Region
ATWDDNLLGPV

SEQ ID NO: 348 - protein, 11 aa, Artificial Sequence
  Anti-c-Met Light Chain Complementarity Determining Region
RASEGISSRLA

SEQ ID NO: 349 - protein, 7 aa, Artificial Sequence
  Anti-c-Met Light Chain Complementarity Determining Region
ATSSLQS

SEQ ID NO: 350 - protein, 9 aa, Artificial Sequence
  Anti-c-Met Light Chain Complementarity Determining Region
LQANTLPLT

SEQ ID NO: 351 - protein, 11 aa, Artificial Sequence
  Anti-c-Met Light Chain Complementarity Determining Region
RASLGVSNYLA

SEQ ID NO: 352 - protein, 7 aa, Artificial Sequence
  Anti-c-Met Light Chain Complementarity Determining Region
AASILQT

SEQ ID NO: 353 - protein, 9 aa, Artificial Sequence
  Anti-c-Met Light Chain Complementarity Determining Region
QHYQGYPYT

SEQ ID NO: 354 - protein, 11 aa, Artificial Sequence
  Anti-c-Met Light Chain Complementarity Determining Region
RASQSIDTYLN

SEQ ID NO: 355 - protein, 7 aa, Artificial Sequence
  Anti-c-Met Light Chain Complementarity Determining Region
AASKLED

SEQ ID NO: 356 - protein, 10 aa, Artificial Sequence
  Anti-c-Met Light Chain Complementarity Determining Region
QQSYSSPGIT

SEQ ID NO: 357 - protein, 11 aa, Artificial Sequence
  Anti-c-Met Light Chain Complementarity Determining Region
QASQDISDYLN

SEQ ID NO: 358 - protein, 7 aa, Artificial Sequence
  Anti-c-Met Light Chain Complementarity Determining Region
DASNLET

SEQ ID NO: 359 - protein, 9 aa, Artificial Sequence
  Anti-c-Met Light Chain Complementarity Determining Region
QQNDNLPFT

SEQ ID NO: 360 - protein, 11 aa, Artificial Sequence
  Anti-c-Met Light Chain Complementarity Determining Region
RASQSISSYLN

SEQ ID NO: 361 - protein, 7 aa, Artificial Sequence
  Anti-c-Met Light Chain Complementarity Determining Region
AASSLQS

SEQ ID NO: 362 - protein, 9 aa, Artificial Sequence
  Anti-c-Met Light Chain Complementarity Determining Region
QQSYSTPYT

SEQ ID NO: 363 - protein, 11 aa, Artificial Sequence
  Anti-c-Met Light Chain Complementarity Determining Region
RAGQAIRNNLG

SEQ ID NO: 364 - protein, 7 aa, Artificial Sequence
  Anti-c-Met Light Chain Complementarity Determining Region
AASSLQS

SEQ ID NO: 365 - protein, 9 aa, Artificial Sequence
  Anti-c-Met Light Chain Complementarity Determining Region
LQHNSFPYT

SEQ ID NO: 366 - protein, 11 aa, Artificial Sequence
  Anti-c-Met Light Chain Complementarity Determining Region
QASQDIINYLN

SEQ ID NO: 367 - protein, 7 aa, Artificial Sequence
  Anti-c-Met Light Chain Complementarity Determining Region
DASNLET

SEQ ID NO: 368 - protein, 9 aa, Artificial Sequence
  Anti-c-Met Light Chain Complementarity Determining Region
QQYDNLPYT

SEQ ID NO: 369 - protein, 12 aa, Artificial Sequence
  Anti-c-Met Light Chain Complementarity Determining Region
RATQSVRHNYLA

SEQ ID NO: 370 - protein, 7 aa, Artificial Sequence
  Anti-c-Met Light Chain Complementarity Determining Region
GAFFRAT

SEQ ID NO: 371 - protein, 9 aa, Artificial Sequence
  Anti-c-Met Light Chain Complementarity Determining Region
QQYGSSPVT

SEQ ID NO: 372 - protein, 11 aa, Artificial Sequence
  Anti-c-Met Light Chain Complementarity Determining Region
RASQSISSYLN

SEQ ID NO: 373 - protein, 7 aa, Artificial Sequence
  Anti-c-Met Light Chain Complementarity Determining Region
AASSLQS

SEQ ID NO: 374 - protein, 9 aa, Artificial Sequence
  Anti-c-Met Light Chain Complementarity Determining Region
QQSYSTSYT

SEQ ID NO: 375 - protein, 12 aa, Artificial Sequence
  Anti-c-Met Light Chain Complementarity Determining Region
RASQSVSSRYLA

SEQ ID NO: 376 - protein, 7 aa, Artificial Sequence
  Anti-c-Met Light Chain Complementarity Determining Region
AASSRAT

SEQ ID NO: 377 - protein, 10 aa, Artificial Sequence
  Anti-c-Met Light Chain Complementarity Determining Region
QQYGSSPPYT

SEQ ID NO: 378 - protein, 11 aa, Artificial Sequence
  Anti-c-Met Light Chain Complementarity Determining Region
RASQSVSFSLA

SEQ ID NO: 379 - protein, 7 aa, Artificial Sequence
  Anti-c-Met Light Chain Complementarity Determining Region
DTSNRVA

SEQ ID NO: 380 - protein, 8 aa, Artificial Sequence
  Anti-c-Met Light Chain Complementarity Determining Region
QHRSNWPG

SEQ ID NO: 381 - protein, 11 aa, Artificial Sequence
  Anti-c-Met Light Chain Complementarity Determining Region
QASQDIINYLN

SEQ ID NO: 382 - protein, 7 aa, Artificial Sequence
  Anti-c-Met Light Chain Complementarity Determining Region
DASNLET

SEQ ID NO: 383 - protein, 9 aa, Artificial Sequence
  Anti-c-Met Light Chain Complementarity Determining Region
QQYDNLPYT

SEQ ID NO: 384 - protein, 11 aa, Artificial Sequence
  Anti-c-Met Light Chain Complementarity Determining Region
QASQHISKYLN

SEQ ID NO: 385 - protein, 7 aa, Artificial Sequence
  Anti-c-Met Light Chain Complementarity Determining Region
DASNLET

SEQ ID NO: 386 - protein, 9 aa, Artificial Sequence
  Anti-c-Met Light Chain Complementarity Determining Region
QQYDNLPLT

SEQ ID NO: 387 - protein, 11 aa, Artificial Sequence
  Anti-c-Met Light Chain Complementarity Determining Region
RASQSIGSYLN

SEQ ID NO: 388 - protein, 7 aa, Artificial Sequence
  Anti-c-Met Light Chain Complementarity Determining Region
AATSLHT

SEQ ID NO: 389 - protein, 9 aa, Artificial Sequence
  Anti-c-Met Light Chain Complementarity Determining Region
QQYDNYPLT

SEQ ID NO: 390 - protein, 11 aa, Artificial Sequence
  Anti-c-Met Light Chain Complementarity Determining Region
RASQGIRNDLG

SEQ ID NO: 391 - protein, 7 aa, Artificial Sequence
  Anti-c-Met Light Chain Complementarity Determining Region
AASSLQS

SEQ ID NO: 392 - protein, 9 aa, Artificial Sequence
  Anti-c-Met Light Chain Complementarity Determining Region
LQHNSYPRT

SEQ ID NO: 393 - protein, 11 aa, Artificial Sequence
  Anti-c-Met Light Chain Complementarity Determining Region
RASQSVSSNLA

SEQ ID NO: 394 - protein, 7 aa, Artificial Sequence
  Anti-c-Met Light Chain Complementarity Determining Region
GASTRAT

SEQ ID NO: 395 - protein, 9 aa, Artificial Sequence
  Anti-c-Met Light Chain Complementarity Determining Region
QQYNNWPRT

SEQ ID NO: 396 - protein, 11 aa, Artificial Sequence
  Anti-c-Met Light Chain Complementarity Determining Region
RASQRIINYVS

SEQ ID NO: 397 - protein, 7 aa, Artificial Sequence
  Anti-c-Met Light Chain Complementarity Determining Region
GASTLQT

SEQ ID NO: 398 - protein, 9 aa, Artificial Sequence
  Anti-c-Met Light Chain Complementarity Determining Region
RQSYSSPLT

SEQ ID NO: 399 - protein, 11 aa, Artificial Sequence
  Anti-c-Met Light Chain Complementarity Determining Region
RASQTITTSLN

SEQ ID NO: 400 - protein, 7 aa, Artificial Sequence
  Anti-c-Met Light Chain Complementarity Determining Region
AASRLQN

SEQ ID NO: 401 - protein, 9 aa, Artificial Sequence
  Anti-c-Met Light Chain Complementarity Determining Region
QQSYNIPYT

SEQ ID NO: 402 - protein, 11 aa, Artificial Sequence
  Anti-c-Met Light Chain Complementarity Determining Region
RASQSIGSYLN

SEQ ID NO: 403 - protein, 7 aa, Artificial Sequence
  Anti-c-Met Light Chain Complementarity Determining Region
DASNLQS

SEQ ID NO: 404 - protein, 9 aa, Artificial Sequence
  Anti-c-Met Light Chain Complementarity Determining Region
QQSYRLFPT

SEQ ID NO: 405 - protein, 11 aa, Artificial Sequence
  Anti-c-Met Light Chain Complementarity Determining Region
QASQGIYNYVN

SEQ ID NO: 406 - protein, 7 aa, Artificial Sequence
  Anti-c-Met Light Chain Complementarity Determining Region
DASNLET

SEQ ID NO: 407 - protein, 9 aa, Artificial Sequence
  Anti-c-Met Light Chain Complementarity Determining Region
QQYDDVPIT

SEQ ID NO: 408 - protein, 11 aa, Artificial Sequence
  Anti-c-Met Light Chain Complementarity Determining Region
RASQGISSWLA

SEQ ID NO: 409 - protein, 7 aa, Artificial Sequence
  Anti-c-Met Light Chain Complementarity Determining Region
AASSLQS

SEQ ID NO: 410 - protein, 9 aa, Artificial Sequence
  Anti-c-Met Light Chain Complementarity Determining Region
QQANSFPIT

SEQ ID NO: 411 - protein, 11 aa, Artificial Sequence
  Anti-c-Met Light Chain Complementarity Determining Region
RSSQSIAKYLT

SEQ ID NO: 412 - protein, 7 aa, Artificial Sequence
  Anti-c-Met Light Chain Complementarity Determining Region
AASELQS

SEQ ID NO: 413 - protein, 9 aa, Artificial Sequence
  Anti-c-Met Light Chain Complementarity Determining Region
QQTYSFPHT

SEQ ID NO: 414 - protein, 11 aa, Artificial Sequence
  Anti-c-Met Light Chain Complementarity Determining Region
AGNNIGSKSVH

SEQ ID NO: 415 - protein, 7 aa, Artificial Sequence
  Anti-c-Met Light Chain Complementarity Determining Region
DDSDRPP

SEQ ID NO: 416 - protein, 11 aa, Artificial Sequence
  Anti-c-Met Light Chain Complementarity Determining Region
QVWDSDSDHYV

SEQ ID NO: 417 - protein, 11 aa, Artificial Sequence
  Anti-c-Met Light Chain Complementarity Determining Region
SGDRLGDKYAS

SEQ ID NO: 418 - protein, 7 aa, Artificial Sequence
  Anti-c-Met Light Chain Complementarity Determining Region
DDSERPS

SEQ ID NO: 419 - protein, 8 aa, Artificial Sequence
  Anti-c-Met Light Chain Complementarity Determining Region
QVWDSSIV

SEQ ID NO: 420 - protein, 14 aa, Artificial Sequence
  Anti-c-Met Light Chain Complementarity Determining Region
TGSTSDVGGYTYVS

SEQ ID NO: 421 - protein, 7 aa, Artificial Sequence
  Anti-c-Met Light Chain Complementarity Determining Region
DVSKRPS

SEQ ID NO: 422 - protein, 10 aa, Artificial Sequence
  Anti-c-Met Light Chain Complementarity Determining Region
CSYAGSYSYV

SEQ ID NO: 423 - protein, 11 aa, Artificial Sequence
  Anti-c-Met Light Chain Complementarity Determining Region
SGDKLGDKYAC

SEQ ID NO: 424 - protein, 7 aa, Artificial Sequence
  Anti-c-Met Light Chain Complementarity Determining Region
QDSKRPS

SEQ ID NO: 425 - protein, 9 aa, Artificial Sequence
  Anti-c-Met Light Chain Complementarity Determining Region
QAWDSSTYV

SEQ ID NO: 426 - protein, 14 aa, Artificial Sequence
  Anti-c-Met Light Chain Complementarity Determining Region
TGTSSDVGGHNYVS

SEQ ID NO: 427 - protein, 7 aa, Artificial Sequence
  Anti-c-Met Light Chain Complementarity Determining Region
DVSKRPS

SEQ ID NO: 428 - protein, 10 aa, Artificial Sequence
  Anti-c-Met Light Chain Complementarity Determining Region
CSYAGRYTYV

SEQ ID NO: 429 - protein, 11 aa, Artificial Sequence
  Anti-c-Met Light Chain Complementarity Determining Region
SGDRLEDKYTS

SEQ ID NO: 430 - protein, 7 aa, Artificial Sequence
  Anti-c-Met Light Chain Complementarity Determining Region
QDNKRPS

SEQ ID NO: 431 - protein, 10 aa, Artificial Sequence
  Anti-c-Met Light Chain Complementarity Determining Region
QAWDSSSAYV

SEQ ID NO: 432 - protein, 11 aa, Artificial Sequence
  Anti-c-Met Light Chain Complementarity Determining Region
GGNNIGSKSVH

SEQ ID NO: 433 - protein, 8 aa, Artificial Sequence
  Anti-c-Met Light Chain Complementarity Determining Region
FFDYDRPS

SEQ ID NO: 434 - protein, 11 aa, Artificial Sequence
  Anti-c-Met Light Chain Complementarity Determining Region
QVWDSRTDRYV

SEQ ID NO: 435 - protein, 5 aa, Artificial Sequence
  Anti-c-Met Heavy Chain Complementarity Determining Region
IYDMH

SEQ ID NO: 436 - protein, 17 aa, Artificial Sequence
  Anti-c-Met Heavy Chain Complementarity Determining Region
WISPSGGRTLYADSVKG

SEQ ID NO: 437 - protein, 17 aa, Artificial Sequence
  Anti-c-Met Heavy Chain Complementarity Determining Region
TWDYYDSSGYFNDAFDI

SEQ ID NO: 438 - protein, 5 aa, Artificial Sequence
  Anti-c-Met Heavy Chain Complementarity Determining Region
AYNMA

SEQ ID NO: 439 - protein, 17 aa, Artificial Sequence
  Anti-c-Met Heavy Chain Complementarity Determining Region
SIVSSGGTTTYADSVKG

SEQ ID NO: 440 - protein, 9 aa, Artificial Sequence
  Anti-c-Met Heavy Chain Complementarity Determining Region
GGVGWLLDY

SEQ ID NO: 441 - protein, 5 aa, Artificial Sequence
  Anti-c-Met Heavy Chain Complementarity Determining Region
AYQMG

SEQ ID NO: 442 - protein, 17 aa, Artificial Sequence
  Anti-c-Met Heavy Chain Complementarity Determining Region
SISSSGGYTSYADSVKG

SEQ ID NO: 443 - protein, 8 aa, Artificial Sequence
  Anti-c-Met Heavy Chain Complementarity Determining Region
ESRYYFDY

SEQ ID NO: 444 - protein, 5 aa, Artificial Sequence
  Anti-c-Met Heavy Chain Complementarity Determining Region
EYPMI

SEQ ID NO: 445 - protein, 17 aa, Artificial Sequence
  Anti-c-Met Heavy Chain Complementarity Determining Region
GIGSSGGSTTYADSVKG

SEQ ID NO: 446 - protein, 13 aa, Artificial Sequence
  Anti-c-Met Heavy Chain Complementarity Determining Region
APLYSSTSYAFDI

SEQ ID NO: 447 - protein, 5 aa, Artificial Sequence
  Anti-c-Met Heavy Chain Complementarity Determining Region
FYWMI

SEQ ID NO: 448 - protein, 17 aa, Artificial Sequence
  Anti-c-Met Heavy Chain Complementarity Determining Region
GIGPSGGTTFYADSVKG

SEQ ID NO: 449 - protein, 5 aa, Artificial Sequence
  Anti-c-Met Heavy Chain Complementarity Determining Region
GYGMV

SEQ ID NO: 450 - protein, 17 aa, Artificial Sequence
  Anti-c-Met Heavy Chain Complementarity Determining Region
SISPSGGETLYADSVKG

SEQ ID NO: 451 - protein, 11 aa, Artificial Sequence
  Anti-c-Met Heavy Chain Complementarity Determining Region
GQMWPGVAFEM

SEQ ID NO: 452 - protein, 5 aa, Artificial Sequence
  Anti-c-Met Heavy Chain Complementarity Determining Region
LYFMT

SEQ ID NO: 453 - protein, 17 aa, Artificial Sequence
  Anti-c-Met Heavy Chain Complementarity Determining Region
SIGSSDGYTRYADSVKG

SEQ ID NO: 454 - protein, 11 aa, Artificial Sequence
  Anti-c-Met Heavy Chain Complementarity Determining Region
DLSWWPDAFDI

SEQ ID NO: 455 - protein, 5 aa, Artificial Sequence
  Anti-c-Met Heavy Chain Complementarity Determining Region
PYRME

SEQ ID NO: 456 - protein, 17 aa, Artificial Sequence
  Anti-c-Met Heavy Chain Complementarity Determining Region
WIYSSGGITNYADSVKG

SEQ ID NO: 457 - skipped

SEQ ID NO: 458 - protein, 5 aa, Artificial Sequence
  Anti-c-Met Heavy Chain Complementarity Determining Region
VYDMV

SEQ ID NO: 459 - protein, 17 aa, Artificial Sequence
  Anti-c-Met Heavy Chain Complementarity Determining Region
SIGPSGGWTGYADSVKG

SEQ ID NO: 460 - protein, 16 aa, Artificial Sequence
  Anti-c-Met Heavy Chain Complementarity Determining Region
DSGGWEALYYYYYMDV

SEQ ID NO: 461 - protein, 5 aa, Artificial Sequence
  Anti-c-Met Heavy Chain Complementarity Determining Region
VYFMD

SEQ ID NO: 462 - protein, 17 aa, Artificial Sequence
  Anti-c-Met Heavy Chain Complementarity Determining Region
GIGPSGGVTSYADSVKG

SEQ ID NO: 463 - protein, 12 aa, Artificial Sequence
  Anti-c-Met Heavy Chain Complementarity Determining Region
GQLAQGHYYMDV

SEQ ID NO: 464 - protein, 5 aa, Artificial Sequence
  Anti-c-Met Heavy Chain Complementarity Determining Region
KYDML

SEQ ID NO: 465 - protein, 17 aa, Artificial Sequence
  Anti-c-Met Heavy Chain Complementarity Determining Region
YIYPSGGLTEYADSVKG

SEQ ID NO: 466 - protein, 10 aa, Artificial Sequence
  Anti-c-Met Heavy Chain Complementarity Determining Region
RAPRSLSFDI

SEQ ID NO: 467 - protein, 5 aa, Artificial Sequence
  Anti-c-Met Heavy Chain Complementarity Determining Region
RYMMA

SEQ ID NO: 468 - protein, 17 aa, Artificial Sequence
  Anti-c-Met Heavy Chain Complementarity Determining Region
SIYPSGGVTEYADSVKG

SEQ ID NO: 469 - protein, 8 aa, Artificial Sequence
  Anti-c-Met Heavy Chain Complementarity Determining Region
EGWYGYPT

SEQ ID NO: 470 - protein, 5 aa, Artificial Sequence
  Anti-c-Met Heavy Chain Complementarity Determining Region
RYMMG

SEQ ID NO: 471 - protein, 17 aa, Artificial Sequence
  Anti-c-Met Heavy Chain Complementarity Determining Region
VIVPSGGFTMYADSVKG

SEQ ID NO: 472 - protein, 13 aa, Artificial Sequence
  Anti-c-Met Heavy Chain Complementarity Determining Region
SSRLWSGYYPFDY

SEQ ID NO: 473 - protein, 5 aa, Artificial Sequence
  Anti-c-Met Heavy Chain Complementarity Determining Region
RYSMT

SEQ ID NO: 474 - protein, 17 aa, Artificial Sequence
  Anti-c-Met Heavy Chain Complementarity Determining Region
SIYSSGGETGYADSVKG

SEQ ID NO: 475 - protein, 8 aa, Artificial Sequence
  Anti-c-Met Heavy Chain Complementarity Determining Region
ERYNSFTS

SEQ ID NO: 476 - protein, 5 aa, Artificial Sequence
  Anti-c-Met Heavy Chain Complementarity Determining Region
SYVMV

SEQ ID NO: 477 - protein, 17 aa, Artificial Sequence
  Anti-c-Met Heavy Chain Complementarity Determining Region
VISPSGGVTFYADSVKG

SEQ ID NO: 478 - protein, 10 aa, Artificial Sequence
  Anti-c-Met Heavy Chain Complementarity Determining Region
DRRSNSLFDP

SEQ ID NO: 479 - protein, 5 aa, Artificial Sequence
  Anti-c-Met Heavy Chain Complementarity Determining Region
TYGMV

SEQ ID NO: 480 - protein, 17 aa, Artificial Sequence
  Anti-c-Met Heavy Chain Complementarity Determining Region
YIWPSGGLTWYADSVKG

SEQ ID NO: 481 - protein, 10 aa, Artificial Sequence
  Anti-c-Met Heavy Chain Complementarity Determining Region
SGYSYGRFDY

SEQ ID NO: 482 - protein, 5 aa, Artificial Sequence
  Anti-c-Met Heavy Chain Complementarity Determining Region
YYDMG

SEQ ID NO: 483 - protein, 17 aa, Artificial Sequence
  Anti-c-Met Heavy Chain Complementarity Determining Region
WISPSGGSTLYADSVKG

SEQ ID NO: 484 - protein, 14 aa, Artificial Sequence
  Anti-c-Met Heavy Chain Complementarity Determining Region
SGLYGSGSYAAFDV

SEQ ID NO: 485 - protein, 5 aa, Artificial Sequence
  Anti-c-Met Heavy Chain Complementarity Determining Region
YYHMV

SEQ ID NO: 486 - protein, 17 aa, Artificial Sequence
  Anti-c-Met Heavy Chain Complementarity Determining Region
YISPSGGDTHYADSVKG

SEQ ID NO: 487 - protein, 8 aa, Artificial Sequence
  Anti-c-Met Heavy Chain Complementarity Determining Region
GRYYGMDV

SEQ ID NO: 488 - protein, 5 aa, Artificial Sequence
  Anti-c-Met Heavy Chain Complementarity Determining Region
GYIMM

SEQ ID NO: 489 - protein, 17 aa, Artificial Sequence
  Anti-c-Met Heavy Chain Complementarity Determining Region
GIYPSGGGTDYADSVKG

SEQ ID NO: 490 - protein, 20 aa, Artificial Sequence
  Anti-c-Met Heavy Chain Complementarity Determining Region
ERPGYYDSTDDDYYYYPMDV

SEQ ID NO: 491 - protein, 5 aa, Artificial Sequence
  Anti-c-Met Heavy Chain Complementarity Determining Region
VYWME

SEQ ID NO: 492 - protein, 17 aa, Artificial Sequence
  Anti-c-Met Heavy Chain Complementarity Determining Region
SISSSGGLTSYADSVKG

SEQ ID NO: 493 - protein, 11 aa, Artificial Sequence
  Anti-c-Met Heavy Chain Complementarity Determining Region
DLVSNWPWGGY

SEQ ID NO: 494 - protein, 5 aa, Artificial Sequence
  Anti-c-Met Heavy Chain Complementarity Determining Region
HYKMG

SEQ ID NO: 495 - protein, 17 aa, Artificial Sequence
  Anti-c-Met Heavy Chain Complementarity Determining Region
SISSSGGDTAYADSVKG

SEQ ID NO: 496 - protein, 16 aa, Artificial Sequence
  Anti-c-Met Heavy Chain Complementarity Determining Region
DRAPYYYDSSGYYSDY

SEQ ID NO: 497 - protein, 5 aa, Artificial Sequence
  Anti-c-Met Heavy Chain Complementarity Determining Region
HYAMY

SEQ ID NO: 498 - protein, 17 aa, Artificial Sequence
  Anti-c-Met Heavy Chain Complementarity Determining Region
SISPSGGYTYYADSVKG

SEQ ID NO: 499 - protein, 10 aa, Artificial Sequence
  Anti-c-Met Heavy Chain Complementarity Determining Region
ESGTTNAFDI

SEQ ID NO: 500 - protein, 5 aa, Artificial Sequence
  Anti-c-Met Heavy Chain Complementarity Determining Region
NYHME

SEQ ID NO: 501 - protein, 17 aa, Artificial Sequence
  Anti-c-Met Heavy Chain Complementarity Determining Region
YISPSGGSTHYADSVKG

SEQ ID NO: 502 - protein, 8 aa, Artificial Sequence
  Anti-c-Met Heavy Chain Complementarity Determining Region
DGWTVPRD

SEQ ID NO: 503 - protein, 5 aa, Artificial Sequence
  Anti-c-Met Heavy Chain Complementarity Determining Region
RYWMA

SEQ ID NO: 504 - protein, 17 aa, Artificial Sequence
  Anti-c-Met Heavy Chain Complementarity Determining Region
SIVSSGGMTDYADSVKG

SEQ ID NO: 505 - protein, 9 aa, Artificial Sequence
  Anti-c-Met Heavy Chain Complementarity Determining Region
HRGDSGLDY

SEQ ID NO: 506 - protein, 5 aa, Artificial Sequence
  Anti-c-Met Heavy Chain Complementarity Determining Region
HYPML

SEQ ID NO: 507 - protein, 17 aa, Artificial Sequence
  Anti-c-Met Heavy Chain Complementarity Determining Region
GISSSGGWTDYADSVKG

SEQ ID NO: 508 - protein, 8 aa, Artificial Sequence
  Anti-c-Met Heavy Chain Complementarity Determining Region
DRALGMDV

SEQ ID NO: 509 - protein, 5 aa, Artificial Sequence
  Anti-c-Met Heavy Chain Complementarity Determining Region
LYSMV

SEQ ID NO: 510 - protein, 17 aa, Artificial Sequence
  Anti-c-Met Heavy Chain Complementarity Determining Region
RIRPSGGQTMYADSVKG

SEQ ID NO: 511 - protein, 6 aa, Artificial Sequence
  Anti-c-Met Heavy Chain Complementarity Determining Region
GYAFDI

SEQ ID NO: 512 - protein, 5 aa, Artificial Sequence
  Anti-c-Met Heavy Chain Complementarity Determining Region
FYDML

SEQ ID NO: 513 - protein, 17 aa, Artificial Sequence
  Anti-c-Met Heavy Chain Complementarity Determining Region
SIWSSGGQTGYADSVKG

SEQ ID NO: 514 - protein, 16 aa, Artificial Sequence
  Anti-c-Met Heavy Chain Complementarity Determining Region
EKASDLSGSYSEALDY

SEQ ID NO: 515 - protein, 5 aa, Artificial Sequence
  Anti-c-Met Heavy Chain Complementarity Determining Region
NYHMN

SEQ ID NO: 516 - protein, 17 aa, Artificial Sequence
  Anti-c-Met Heavy Chain Complementarity Determining Region
YIYPSGGVTYYADSVKG

SEQ ID NO: 517 - protein, 16 aa, Artificial Sequence
  Anti-c-Met Heavy Chain Complementarity Determining Region
GIAAAGNYYYYYGMDV

SEQ ID NO: 518 - protein, 5 aa, Artificial Sequence
  Anti-c-Met Heavy Chain Complementarity Determining Region
KYGMV

SEQ ID NO: 519 - protein, 17 aa, Artificial Sequence
  Anti-c-Met Heavy Chain Complementarity Determining Region
SISSSGGNTAYADSVKG

SEQ ID NO: 520 - protein, 15 aa, Artificial Sequence
  Anti-c-Met Heavy Chain Complementarity Determining Region
GELERRRRNYYGMDV

SEQ ID NO: 521 - protein, 5 aa, Artificial Sequence
  Anti-c-Met Heavy Chain Complementarity Determining Region
NYAMT

SEQ ID NO: 522 - protein, 17 aa, Artificial Sequence
  Anti-c-Met Heavy Chain Complementarity Determining Region
SIYSSGGDTAYADYVKG

SEQ ID NO: 523 - protein, 10 aa, Artificial Sequence
  Anti-c-Met Heavy Chain Complementarity Determining Region
EYYTGWNFDY

SEQ ID NO: 524 - protein, 5 aa, Artificial Sequence
  Anti-c-Met Heavy Chain Complementarity Determining Region
QYDMV

SEQ ID NO: 525 - protein, 17 aa, Artificial Sequence
  Anti-c-Met Heavy Chain Complementarity Determining Region
YIYSSGGHTLYVDSVKG

SEQ ID NO: 526 - protein, 13 aa, Artificial Sequence
  Anti-c-Met Heavy Chain Complementarity Determining Region
IRSSGYYHEVLDY

SEQ ID NO: 527 - protein, 5 aa, Artificial Sequence
  Anti-c-Met Heavy Chain Complementarity Determining Region
TYMMY

SEQ ID NO: 528 - protein, 17 aa, Artificial Sequence
  Anti-c-Met Heavy Chain Complementarity Determining Region
VIGPSGGATGYADSVKG

SEQ ID NO: 529 - protein, 14 aa, Artificial Sequence
  Anti-c-Met Heavy Chain Complementarity Determining Region
IRKAFGYGSGSLDY

SEQ ID NO: 530 - protein, 5 aa, Artificial Sequence
  Anti-c-Met Heavy Chain Complementarity Determining Region
YYDMQ

SEQ ID NO: 531 - protein, 17 aa, Artificial Sequence
  Anti-c-Met Heavy Chain Complementarity Determining Region
YIGPSGGDTDYADSVKG

SEQ ID NO: 532 - protein, 17 aa, Artificial Sequence
  Anti-c-Met Heavy Chain Complementarity Determining Region
SSYYYDSSGYYHEAFDI

SEQ ID NO: 533 - protein, 5 aa, Artificial Sequence
  Anti-c-Met Heavy Chain Complementarity Determining Region
YYMMR

SEQ ID NO: 534 - protein, 17 aa, Artificial Sequence
  Anti-c-Met Heavy Chain Complementarity Determining Region
YIGPSGGATTYADSVKG

SEQ ID NO: 535 - protein, 18 aa, Artificial Sequence
  Anti-c-Met Heavy Chain Complementarity Determining Region
GRSVKYYYDSSGYLLFDY

SEQ ID NO: 536 - protein, 5 aa, Artificial Sequence
  Anti-c-Met Heavy Chain Complementarity Determining Region
HYSMY

SEQ ID NO: 537 - protein, 17 aa, Artificial Sequence
  Anti-c-Met Heavy Chain Complementarity Determining Region
GIYSSGGPTIYADSVKG

SEQ ID NO: 538 - protein, 13 aa, Artificial Sequence
  Anti-c-Met Heavy Chain Complementarity Determining Region
LQIEMATIGHFDY

SEQ ID NO: 539 - protein, 5 aa, Artificial Sequence
  Anti-c-Met Heavy Chain Complementarity Determining Region
QYDMV

SEQ ID NO: 540 - protein, 17 aa, Artificial Sequence
  Anti-c-Met Heavy Chain Complementarity Determining Region
YIYSSGGHTLYVDSVKG

SEQ ID NO: 541 - protein, 13 aa, Artificial Sequence
  Anti-c-Met Heavy Chain Complementarity Determining Region
IRSSGYYHEVLDY

SEQ ID NO: 542 - protein, 5 aa, Artificial Sequence
  Anti-c-Met Heavy Chain Complementarity Determining Region
HYWMM

SEQ ID NO: 543 - protein, 17 aa, Artificial Sequence
  Anti-c-Met Heavy Chain Complementarity Determining Region
SIVPSGGDTYYADSVKG

SEQ ID NO: 544 - protein, 9 aa, Artificial Sequence
  Anti-c-Met Heavy Chain Complementarity Determining Region
DPVMTPVDY

SEQ ID NO: 545 - protein, 5 aa, Artificial Sequence
  Anti-c-Met Heavy Chain Complementarity Determining Region
PYFMN

SEQ ID NO: 546 - protein, 17 aa, Artificial Sequence
  Anti-c-Met Heavy Chain Complementarity Determining Region
SIYPSGGITKYADSVKG

SEQ ID NO: 547 - protein, 14 aa, Artificial Sequence
  Anti-c-Met Heavy Chain Complementarity Determining Region
ETYYYGSGSYAFDI

SEQ ID NO: 548 - protein, 5 aa, Artificial Sequence
  Anti-c-Met Heavy Chain Complementarity Determining Region
QYYMY

SEQ ID NO: 549 - protein, 17 aa, Artificial Sequence
  Anti-c-Met Heavy Chain Complementarity Determining Region
RISPSGGMTSYADSVKG

SEQ ID NO: 550 - protein, 8 aa, Artificial Sequence
  Anti-c-Met Heavy Chain Complementarity Determining Region
HKYGGPDF

SEQ ID NO: 551 - protein, 5 aa, Artificial Sequence
  Anti-c-Met Heavy Chain Complementarity Determining Region
RYQMN

SEQ ID NO: 552 - protein, 17 aa, Artificial Sequence
  Anti-c-Met Heavy Chain Complementarity Determining Region
SIRSSGGVTKYADSVKG

SEQ ID NO: 553 - protein, 6 aa, Artificial Sequence
  Anti-c-Met Heavy Chain Complementarity Determining Region
GRGLSS

SEQ ID NO: 554 - protein, 5 aa, Artificial Sequence
  Anti-c-Met Heavy Chain Complementarity Determining Region
LYTMA

SEQ ID NO: 555 - protein, 17 aa, Artificial Sequence
  Anti-c-Met Heavy Chain Complementarity Determining Region
YISPSGGFTGYADSVKG

SEQ ID NO: 556 - protein, 4 aa, Artificial Sequence
  Anti-c-Met Heavy Chain Complementarity Determining Region
WGDP

SEQ ID NO: 557 - protein, 5 aa, Artificial Sequence
  Anti-c-Met Heavy Chain Complementarity Determining Region
DYFMG

SEQ ID NO: 558 - protein, 17 aa, Artificial Sequence
  Anti-c-Met Heavy Chain Complementarity Determining Region
RISSSGGHTMYADSVKG

SEQ ID NO: 559 - protein, 17 aa, Artificial Sequence
  Anti-c-Met Heavy Chain Complementarity Determining Region
EEDYYDSSGYYPPAFDI

SEQ ID NO: 560 - protein, 5 aa, Artificial Sequence
  Anti-c-Met Heavy Chain Complementarity Determining Region
IYWMY

SEQ ID NO: 561 - protein, 17 aa, Artificial Sequence
  Anti-c-Met Heavy Chain Complementarity Determining Region
GIGPSGGYTSYADSVKG

SEQ ID NO: 562 - protein, 7 aa, Artificial Sequence
  Anti-c-Met Heavy Chain Complementarity Determining Region
GNGGFDS

SEQ ID NO: 563 - protein, 5 aa, Artificial Sequence
  Anti-c-Met Heavy Chain Complementarity Determining Region
PYHMS

SEQ ID NO: 564 - protein, 17 aa, Artificial Sequence
  Anti-c-Met Heavy Chain Complementarity Determining Region
SIYPSGGFTAYADSVKG

SEQ ID NO: 565 - protein, 15 aa, Artificial Sequence
  Anti-c-Met Heavy Chain Complementarity Determining Region
ESAYYYDSSPPAFDI

SEQ ID NO: 566 - protein, 5 aa, Artificial Sequence
  Anti-c-Met Heavy Chain Complementarity Determining Region
TYAMY

SEQ ID NO: 567 - protein, 17 aa, Artificial Sequence
  Anti-c-Met Heavy Chain Complementarity Determining Region
SIYSSGGATWYADSVKG

SEQ ID NO: 568 - protein, 8 aa, Artificial Sequence
  Anti-c-Met Heavy Chain Complementarity Determining Region
STFDYFDY

SEQ ID NO: 569 - protein, 5 aa, Artificial Sequence
  Anti-c-Met Heavy Chain Complementarity Determining Region
KYRMM

SEQ ID NO: 570 - protein, 17 aa, Artificial Sequence
  Anti-c-Met Heavy Chain Complementarity Determining Region
YISSSGGATIYADSVKG

SEQ ID NO: 571 - protein, 12 aa, Artificial Sequence
  Anti-c-Met Heavy Chain Complementarity Determining Region
HGPQIAAWYFDL

SEQ ID NO: 572 - protein, 5 aa, Artificial Sequence
  Anti-c-Met Heavy Chain Complementarity Determining Region
PYSMD

SEQ ID NO: 573 - protein, 17 aa, Artificial Sequence
  Anti-c-Met Heavy Chain Complementarity Determining Region
GISSSGGRTVYADSVKG

SEQ ID NO: 574 - protein, 19 aa, Artificial Sequence
  Anti-c-Met Heavy Chain Complementarity Determining Region
GPYYDFWSGYYIDRGPLDY

SEQ ID NO: 575 - protein, 5 aa, Artificial Sequence
  Anti-c-Met Heavy Chain Complementarity Determining Region
WYMMA

SEQ ID NO: 576 - protein, 17 aa, Artificial Sequence
  Anti-c-Met Heavy Chain Complementarity Determining Region
WISSSGGFTPYADSVKG

SEQ ID NO: 577 - protein, 11 aa, Artificial Sequence
  Anti-c-Met Heavy Chain Complementarity Determining Region
GQQWPGVAFDI

SEQ ID NO: 578 - protein, 5 aa, Artificial Sequence
  Anti-c-Met Heavy Chain Complementarity Determining Region
FYPMM

SEQ ID NO: 579 - protein, 15 aa, Artificial Sequence
  Anti-c-Met Heavy Chain Complementarity Determining Region
YIGPSGGNNADSVKG

SEQ ID NO: 580 - protein, 10 aa, Artificial Sequence
  Anti-c-Met Heavy Chain Complementarity Determining Region
GLWFGGRLDY

SEQ ID NO: 581 - protein, 5 aa, Artificial Sequence
  Anti-c-Met Heavy Chain Complementarity Determining Region
HYWMK

SEQ ID NO: 582 - protein, 17 aa, Artificial Sequence
  Anti-c-Met Heavy Chain Complementarity Determining Region
GISSSGGQTDYADSVKG

SEQ ID NO: 583 - protein, 18 aa, Artificial Sequence
  Anti-c-Met Heavy Chain Complementarity Determining Region
SPRLRFLEWPRNYYGMDV

SEQ ID NO: 584 - protein, 5 aa, Artificial Sequence
  Anti-c-Met Heavy Chain Complementarity Determining Region
LYMMV

SEQ ID NO: 585 - protein, 15 aa, Artificial Sequence
  Anti-c-Met Heavy Chain Complementarity Determining Region
YIGPSGGAYADSVKG

SEQ ID NO: 586 - protein, 9 aa, Artificial Sequence
  Anti-c-Met Heavy Chain Complementarity Determining Region
SVRGLTFDY

SEQ ID NO: 587 - protein, 5 aa, Artificial Sequence
  Anti-c-Met Heavy Chain Complementarity Determining Region
PYEMG

SEQ ID NO: 588 - protein, 17 aa, Artificial Sequence
  Anti-c-Met Heavy Chain Complementarity Determining Region
RISPSGGMTLYADSVKG

SEQ ID NO: 589 - protein, 14 aa, Artificial Sequence
  Anti-c-Met Heavy Chain Complementarity Determining Region
MGRGGWWAFDAFDI

SEQ ID NO: 590 - protein, 5 aa, Artificial Sequence
  Anti-c-Met Heavy Chain Complementarity Determining Region
WYKMV

SEQ ID NO: 591 - protein, 17 aa, Artificial Sequence
  Anti-c-Met Heavy Chain Complementarity Determining Region
GIYPSGGTTHYADSVKG

SEQ ID NO: 592 - protein, 14 aa, Artificial Sequence
  Anti-c-Met Heavy Chain Complementarity Determining Region
GGGDFWSGYYPFDY

SEQ ID NO: 593 - protein, 11 aa, Artificial Sequence
  Anti-c-Met Light Chain Complementarity Determining Region
AAWDDSLNGWV

SEQ ID NO: 594 - protein, 7 aa, Artificial Sequence
  Anti-c-Met Heavy Chain Complementarity Determining Region
GGSYFDL

SEQ ID NO: 595 - protein, 110 aa, Artificial Sequence
  Human IgG1 CH2 with L235A, E318A, K320A and K322A substitutions
APELAGGPSVFLFPPKPKDTLMISRTPEVTCVVVDVSHEDPEVKFNWYVDGVEVHNAKTKPREEQYNSTYRVVSVLTVLHQDWLNGKAYACAVSNKALPAPIEKTISKAK

SEQ ID NO: 596 - protein, 110 aa, Artificial Sequence
  Human IgG1 CH2 with L234A, L235A, G237A, E318A, K320A and K322A
APEAAGAPSVFLFPPKPKDTLMISRTPEVTCVVVDVSHEDPEVKFNWYVDGVEVHNAKTKPREEQYNSTYRVVSVLTVLHQDWLNGKAYACAVSNKALPAPIEKTISKAK

SEQ ID NO: 597 - protein, 11 aa, Artificial Sequence
  Anti-c-Met Light Chain Complementarity Determining
QGDSLRNYHPS

SEQ ID NO: 598 - protein, 3 aa, Artificial Sequence
  Junction amino acids
RDQ

SEQ ID NO: 599 - protein, 4 aa, Artificial Sequence
  Junction amino acids
SASS

SEQ ID NO: 600 - protein, 3 aa, Artificial Sequence
  Junction amino acids
SSS

SEQ ID NO: 601 - protein, 17 aa, Artificial Sequence
  NKG2D Linker
NSLFNQEVQIPLTESYS

SEQ ID NO: 602 - protein, 107 aa, Artificial Sequence
  Anti-RON mAb 4C04 light chain
DIQMTQSPASQSASLGESVTITCLASQTIGTWLAWYQQKPGKSPQLLIYAATSLADGVPSRFSASGSGTKFSFKIDSLQSEDFVSYYCQQLYNTPWTFGGGTKLEIK

SEQ ID NO: 603 - protein, 121 aa, Artificial Sequence
  Anti-RON mAb 4C04 heavy chain
QIQLQQSGPELVKPGTSVKISCKASDYTLTDFYMNWVRQKPGQGLEWIGRIYPGTDKTRYNEKFRDKAILTVDTSSSTAYMQLSSLTSEDTAVYFCARSAYYGNYVAMDYWGQGTSVTVSS

SEQ ID NO: 604 - protein, 6 aa, Artificial Sequence
  Anti-RON mAb 4C04 light chain CDR1
QTIGTW

SEQ ID NO: 605 - protein, 3 aa, Artificial Sequence
  Anti-RON mAb 4C04 light chain CDR2
AAT

SEQ ID NO: 606 - protein, 9 aa, Artificial Sequence
  Anti-RON mAb 4C04 light chain CDR3
QQLYNTPWT

SEQ ID NO: 607 - protein, 8 aa, Artificial Sequence
  Anti-RON mAb 4C04 heavy chain CDR1
DYTLTDFY

SEQ ID NO: 608 - protein, 8 aa, Artificial Sequence
  Anti-RON mAb 4C04 heavy chain CDR2
IYPGTDKT

SEQ ID NO: 609 - protein, 14 aa, Artificial Sequence
  Anti-RON mAb 4C04 heavy chain CDR3
ARSAYYGNYVAMDY

SEQ ID NO: 610 - protein, 107 aa, Artificial Sequence
  Anti-RON mAb 11H09 light chain
DIQMTQSPSSLSASLGERVSLTCRASQDIGSSLSWLQQEPDGTIKRLIYSTSSLDSGVPKRFSGSRSGSDYSLTISSLESEDFVDYYCLQYASSPWTFGGGTKLEIK

SEQ ID NO: 611 - protein, 117 aa, Artificial Sequence
  Anti-RON mAb 11H09 heavy chain
QVQLQQSGAELAKPGASVKMSCKSSGYTFTSYWIHWVKERPGQGLEWIGYIYPTTGYTESNQKFKDKATLTADKSSSTAYMQLSSLTSEDSAVYYCFLLRPWYFDVWGAGTTVTVSS

SEQ ID NO: 612 - protein, 6 aa, Artificial Sequence
  Anti-RON mAb 11H09 light chain CDR1
QDIGSS

SEQ ID NO: 613 - protein, 3 aa, Artificial Sequence
  Anti-RON mAb 11H09 light chain CDR2
STS

SEQ ID NO: 614 - protein, 9 aa, Artificial Sequence
  Anti-RON mAb 11H09 light chain CDR3
LQYASSPWT

SEQ ID NO: 615 - protein, 8 aa, Artificial Sequence
  Anti-RON mAb 11H09 heavy chain CDR1
GYTFTSYW

SEQ ID NO: 616 - protein, 8 aa, Artificial Sequence
  Anti-RON mAb 11H09 heavy chain CDR2
IYPTTGYT

SEQ ID NO: 617 - protein, 10 aa, Artificial Sequence
  Anti-RON mAb 11H09 heavy chain CDR3
FLLRPWYFDV

SEQ ID NO: 618 - protein, 2 aa, Artificial Sequence
  Made in a lab
NS

SEQ ID NO: 619 - protein, 6 aa, Artificial Sequence
  Made in a lab
SCPPCP

SEQ ID NO: 620 - protein, 8 aa, Artificial Sequence
  Made in a lab
GGGGSGNS

SEQ ID NO: 621 - protein, 8 aa, Artificial Sequence
  Made in a lab
GCPPCPNS

SEQ ID NO: 622 - protein, 8 aa, Artificial Sequence
  Made in a lab
GSPPSPNS

SEQ ID NO: 623 - protein, 8 aa, Artificial Sequence
  Made in a lab
GSPPSPNS

SEQ ID NO: 624 - protein, 8 aa, Artificial Sequence
  Made in a lab
GCPPCPNS

SEQ ID NO: 625 - protein, 8 aa, Artificial Sequence
  Made in a lab
GCPPCPNS

SEQ ID NO: 626 - protein, 9 aa, Artificial Sequence
  Made in a lab
GCPPCPGNS

SEQ ID NO: 627 - protein, 9 aa, Artificial Sequence
  Made in a lab
GCPPCPANS

SEQ ID NO: 628 - protein, 9 aa, Artificial Sequence
  Made in a lab
GCPPCPANS

SEQ ID NO: 629 - protein, 9 aa, Artificial Sequence
  Made in a lab
EEEEDEGNS

SEQ ID NO: 630 - protein, 10 aa, Artificial Sequence
  Made in a lab
NYGGGGSGNS

SEQ ID NO: 631 - protein, 10 aa, Artificial Sequence
  Made in a lab
VSERPFPPNS

SEQ ID NO: 632 - protein, 11 aa, Artificial Sequence
  Made in a lab
EPKSCDKTCCP

SEQ ID NO: 633 - protein, 11 aa, Artificial Sequence
  Made in a lab
SQPEIVPISNS

SEQ ID NO: 634 - protein, 12 aa, Artificial Sequence
  Made in a lab
GGGGSCPPCPNS

SEQ ID NO: 635 - protein, 12 aa, Artificial Sequence
  Made in a lab
KADFLTPSIGNS

SEQ ID NO: 636 - protein, 12 aa, Artificial Sequence
  Made in a lab
QMNSELSVLANS

SEQ ID NO: 637 - protein, 13 aa, Artificial Sequence
  Made in a lab
EPKSCDKTHTCCP

SEQ ID NO: 638 - protein, 13 aa, Artificial Sequence
  Made in a lab
EPKSCDKTCPPCP

SEQ ID NO: 639 - protein, 13 aa, Artificial Sequence
  Made in a lab
GGGGSGGGGSGNS

SEQ ID NO: 640 - protein, 13 aa, Artificial Sequence
  Made in a lab
GCPPCPGGGGSNS

SEQ ID NO: 641 - protein, 13 aa, Artificial Sequence
  Made in a lab
GGGGSCPPCPGNS

SEQ ID NO: 642 - protein, 13 aa, Artificial Sequence
  Made in a lab
GCPPCPGGGGSNS

SEQ ID NO: 643 - protein, 13 aa, Artificial Sequence
  Made in a lab
GGGASCPPCPGNS

SEQ ID NO: 644 - protein, 13 aa, Artificial Sequence
  Made in a lab
GGGASCPPCAGNS

SEQ ID NO: 645 - protein, 13 aa, Artificial Sequence
  Made in a lab
GGGASCPPCAGNS

SEQ ID NO: 646 - protein, 15 aa, Artificial Sequence
  Made in a lab
NYGGGGSGGGGSGNS

SEQ ID NO: 647 - protein, 15 aa, Artificial Sequence
  Made in a lab
LSVKADFLTPSIGNS

SEQ ID NO: 648 - protein, 15 aa, Artificial Sequence
  Made in a lab
LSVLANFSQPEIGNS

SEQ ID NO: 649 - protein, 15 aa, Artificial Sequence
  Made in a lab
LKIQERVSKPKISNS

SEQ ID NO: 650 - protein, 15 aa, Artificial Sequence
  Made in a lab
LDVSERPFPPHIQNS

SEQ ID NO: 651 - protein, 15 aa, Artificial Sequence
  Made in a lab
REQLAEVTLSLKANS

SEQ ID NO: 652 - protein, 15 aa, Artificial Sequence
  Made in a lab
RIHQMNSELSVLANS

SEQ ID NO: 653 - protein, 15 aa, Artificial Sequence
  Made in a lab
DTKGKNVLEKIFSNS

SEQ ID NO: 654 - protein, 15 aa, Artificial Sequence
  Made in a lab
LPPETQESQEVTLNS

SEQ ID NO: 655 - protein, 15 aa, Artificial Sequence
  Made in a lab
RIHLNVSERPFPPNS

SEQ ID NO: 656 - protein, 15 aa, Artificial Sequence
  Made in a lab
LSVKADFLTPSIGNS

SEQ ID NO: 657 - protein, 15 aa, Artificial Sequence
  Made in a lab
LSVLANFSQPEIGNS

SEQ ID NO: 658 - protein, 15 aa, Artificial Sequence
  Made in a lab
LSVLANFSQPEIGNS

SEQ ID NO: 659 - protein, 15 aa, Artificial Sequence
  Made in a lab
RIHQMNSELSVLANS

SEQ ID NO: 660 - protein, 15 aa, Artificial Sequence
  Made in a lab
KPFFTCGSADTCPNS

SEQ ID NO: 661 - protein, 15 aa, Artificial Sequence
  Made in a lab
KPFFTCGSADTCPNS

SEQ ID NO: 662 - protein, 15 aa, Artificial Sequence
  Made in a lab
QYNCPGQYTFSMPNS

SEQ ID NO: 663 - protein, 15 aa, Artificial Sequence
  Made in a lab
GGGGSGGGGSGGGGS

SEQ ID NO: 664 - protein, 15 aa, Artificial Sequence
  Made in a lab
EPKSSDKTHTCPPCP

SEQ ID NO: 665 - protein, 15 aa, Artificial Sequence
  Made in a lab
EPKSSDKTHTCPPCS

SEQ ID NO: 666 - protein, 15 aa, Artificial Sequence
  Made in a lab
EPKSCDKTHTSPPCS

SEQ ID NO: 667 - protein, 15 aa, Artificial Sequence
  Made in a lab
EPKSCDKTHTCPPCP

SEQ ID NO: 668 - protein, 15 aa, Artificial Sequence
  Made in a lab
EPKSCDKTHTSPPSS

SEQ ID NO: 669 - protein, 15 aa, Artificial Sequence
  Made in a lab
PRGPTIKPCPPCKCP

SEQ ID NO: 670 - protein, 15 aa, Artificial Sequence
  Made in a lab
EPKSSDKTHTSPPSS

SEQ ID NO: 671 - protein, 15 aa, Artificial Sequence
  Made in a lab
EPKSSDKTHTSPPCS

SEQ ID NO: 672 - protein, 15 aa, Artificial Sequence
  Made in a lab
EPKSSDKTHTCPPSS

SEQ ID NO: 673 - protein, 15 aa, Artificial Sequence
  Made in a lab
EPKSCDKTHTSPPCP

SEQ ID NO: 674 - protein, 15 aa, Artificial Sequence
  Made in a lab
EPKSSDKTHTSPPSP

SEQ ID NO: 675 - protein, 15 aa, Artificial Sequence
  Made in a lab
EPKSSDKTHTSPPCP

SEQ ID NO: 676 - protein, 15 aa, Artificial Sequence
  Made in a lab
EPKSCDKTHTSPPSP

SEQ ID NO: 677 - protein, 15 aa, Artificial Sequence
  Made in a lab
EPKSSDKTHTCPPSP

SEQ ID NO: 678 - protein, 15 aa, Artificial Sequence
  Made in a lab
GGGGCDKTHTCPPCP

SEQ ID NO: 679 - protein, 15 aa, Artificial Sequence
  Made in a lab
EPKSCGGGGGCPPCP

SEQ ID NO: 680 - protein, 15 aa, Artificial Sequence
  Made in a lab
EPKSCDKTHTCGGCP

SEQ ID NO: 681 - protein, 15 aa, Artificial Sequence
  Made in a lab
EPKSCDKTHTCPPCG

SEQ ID NO: 682 - protein, 15 aa, Artificial Sequence
  Made in a lab
EPKSCDKTHTCPPSP

SEQ ID NO: 683 - protein, 15 aa, Artificial Sequence
  Made in a lab
EPKSCDKCHTCPPCP

SEQ ID NO: 684 - protein, 15 aa, Artificial Sequence
  Made in a lab
EPKSCDKTCCCPPCP

SEQ ID NO: 685 - protein, 15 aa, Artificial Sequence
  Made in a lab
EPKSCPPPPPCPPCP

SEQ ID NO: 686 - protein, 15 aa, Artificial Sequence
  Made in a lab
PPPPCDKTHTCPPCP

SEQ ID NO: 687 - protein, 15 aa, Artificial Sequence
  Made in a lab
EPKSCDKTHTCWWCP

SEQ ID NO: 688 - protein, 15 aa, Artificial Sequence
  Made in a lab
EPKSCDWWHTCPPCP

SEQ ID NO: 689 - protein, 15 aa, Artificial Sequence
  Made in a lab
EPKCSDKTHTCPPCP

SEQ ID NO: 690 - protein, 15 aa, Artificial Sequence
  Made in a lab
EPKSDCKTHTCPPCP

SEQ ID NO: 691 - protein, 15 aa, Artificial Sequence
  Made in a lab
EPKSDCWWHTCPPCP

SEQ ID NO: 692 - protein, 15 aa, Artificial Sequence
  Made in a lab
EPKSCDFFHTCPPCP

SEQ ID NO: 693 - protein, 15 aa, Artificial Sequence
  Made in a lab
EPKSCDWWWTCPPCP

SEQ ID NO: 694 - protein, 15 aa, Artificial Sequence
  Made in a lab
EPKSCWWTHTCPPCP

SEQ ID NO: 695 - protein, 15 aa, Artificial Sequence
  Made in a lab
EPWWCDKTHTCPPCP

SEQ ID NO: 696 - protein, 16 aa, Artificial Sequence
  Made in a lab
SQPEIVPISCPPCPNS

SEQ ID NO: 697 - protein, 17 aa, Artificial Sequence
  Made in a lab
TGEPKSSDKTHTCPPCP

SEQ ID NO: 698 - protein, 17 aa, Artificial Sequence
  Made in a lab
EPKSTDKTHTCPPCPNS

SEQ ID NO: 699 - protein, 17 aa, Artificial Sequence
  Made in a lab
EPKSTDKTHTSPPSPNS

SEQ ID NO: 700 - protein, 17 aa, Artificial Sequence
  Made in a lab
EPKSTDKTHTCPPCPNS

SEQ ID NO: 701 - protein, 17 aa, Artificial Sequence
  Made in a lab
EPKSSDKTHTCPPCPNS

SEQ ID NO: 702 - protein, 18 aa, Artificial Sequence
  Made in a lab
EPKSCDKTHTCPGGGPCP

SEQ ID NO: 703 - protein, 18 aa, Artificial Sequence
  Made in a lab
EPKSCDGGGKTHTCPPCP

SEQ ID NO: 704 - protein, 18 aa, Artificial Sequence
  Made in a lab
EPKSCDPPPKTHTCPPCP

SEQ ID NO: 705 - protein, 18 aa, Artificial Sequence
  Made in a lab
EPKSCDKTHTCPPPPPCP

SEQ ID NO: 706 - protein, 18 aa, Artificial Sequence
  Made in a lab
GGGGSGGGGSGGGGSGNS

SEQ ID NO: 707 - protein, 19 aa, Artificial Sequence
  Made in a lab
NYGGGGSGGGGSGGGGSNS

SEQ ID NO: 708 - protein, 19 aa, Artificial Sequence
  Made in a lab
LSVKADFLTPSISPPCPNS

SEQ ID NO: 709 - protein, 19 aa, Artificial Sequence
  Made in a lab
SVLANFSQPEISCPPCPNS

SEQ ID NO: 710 - protein, 20 aa, Artificial Sequence
  Made in a lab
GQRHNNSSLNTRTQKARHSP

SEQ ID NO: 711 - protein, 20 aa, Artificial Sequence
  Made in a lab
LSVLANFSQPEISCPPCPNS

SEQ ID NO: 712 - protein, 20 aa, Artificial Sequence
  Made in a lab
LKIQERVSKPKISCPPCPNS

SEQ ID NO: 713 - protein, 20 aa, Artificial Sequence
  Made in a lab
REQLAEVTLSLKACPPCPNS

SEQ ID NO: 714 - protein, 20 aa, Artificial Sequence
  Made in a lab
RIHQMNSELSVLACPPCPNS

SEQ ID NO: 715 - protein, 20 aa, Artificial Sequence
  Made in a lab
RIHLNVSERPFPPCPPCPNS

SEQ ID NO: 716 - protein, 20 aa, Artificial Sequence
  Made in a lab
NSLFNQEVQIPLTESYCPNS

SEQ ID NO: 717 - protein, 20 aa, Artificial Sequence
  Made in a lab
EEEEDEEDEEDEEEEEDGNS

SEQ ID NO: 718 - protein, 21 aa, Artificial Sequence
  Made in a lab
LDVSERPFPPHIQSCPPCPNS

SEQ ID NO: 719 - protein, 21 aa, Artificial Sequence
  Made in a lab
DTKGKNVLEKIFDSCPPCPNS

SEQ ID NO: 720 - protein, 21 aa, Artificial Sequence
  Made in a lab
LPPETQESQEVTLSCPPCPNS

SEQ ID NO: 721 - protein, 21 aa, Artificial Sequence
  Made in a lab
EPAFTPGPNIELQKDSDCPNS

SEQ ID NO: 722 - protein, 21 aa, Artificial Sequence
  Made in a lab
QRHNNSSLNTRTQKARHCPNS

SEQ ID NO: 723 - protein, 21 aa, Artificial Sequence
  Made in a lab
QRHNNSSLNTRTQKARHSPNS

SEQ ID NO: 724 - protein, 36 aa, Artificial Sequence
  Made in a lab
NYGGGGSGGGGSGGGGSNYGGGGSGGGGSGGGGSNS

SEQ ID NO: 725 - protein, 122 aa, Artificial Sequence
  Made in a lab
RTRYLQVSQQLQQTNRVLEVTNSSLRQQLRLKITQLGQSAEDLQGSRRELAQSQEALQVEQRAHQAAEGQLQACQADRQKTKETLQSEEQQRRALEQKLSNMENRLKPFFTCGSADTCCPNS

SEQ ID NO: 726 - protein, 13 aa, Artificial Sequence
  Made in a lab
GGGASCPPCAGNS

SEQ ID NO: 727 - protein, 39 aa, Artificial Sequence
  Made in a lab
NNYGGGGSGGGGSGGGGSGNYGGGGSGGGGSGGGGSGNS

SEQ ID NO: 728 - protein, 20 aa, Artificial Sequence
  Made in a lab
NYGGGGSGGGGSGGGGSGNS

SEQ ID NO: 729 - protein, 7 aa, Artificial Sequence
  Made in a lab
SPPSPNS

SEQ ID NO: 730 - protein, 17 aa, Artificial Sequence
  Made in a lab
EPTSTDKTHTSPPSPNS

SEQ ID NO: 731 - protein, 17 aa, Artificial Sequence
  Made in a lab
EPTSTDKTHTCPPCPNS

SEQ ID NO: 732 - protein, 19 aa, Artificial Sequence
  Made in a lab
LSVKADFLTPSISPPCPNS

SEQ ID NO: 733 - protein, 12 aa, Artificial Sequence
  Made in a lab
GGGASCPPCANS

SEQ ID NO: 734 - protein, 22 aa, Artificial Sequence
  Made in a lab
RTQRHNNSSLNTRTQKARHSGH

SEQ ID NO: 735 - protein, 118 aa, Artificial Sequence
  Made in a lab
RTRYLQVSQQLQQTNRVLEVTNSSLRQQLRLKITQLGQSAEDLQGSRRELAQSQEALQVEQRAHQAAEGQLQACQADRQKTKETLQSEEQQRRALEQKLSNMENRLKPFFTCGSADTC

SEQ ID NO: 736 - protein, 35 aa, Artificial Sequence
  Made in a lab
RTQSEEQQRRALEQKLSNMENRLKPFFTCGSADTC

SEQ ID NO: 737 - protein, 25 aa, Artificial Sequence
  Made in a lab
RTEQKLSNMENRLKPFFTCGSADTC

SEQ ID NO: 738 - protein, 26 aa, Artificial Sequence
  Made in a lab
SGGGGSGGGGSGGGGSGGGGSGGGGS

SEQ ID NO: 739 - protein, 16 aa, Artificial Sequence
  Made in a lab
GGGGSGGGGSGGGGAS

SEQ ID NO: 740 - protein, 16 aa, Artificial Sequence
  Made in a lab
SEPKSSDKTHTCPPCP

SEQ ID NO: 741 - protein, 18 aa, Artificial Sequence
  Made in a lab
GDQEPKSSDKTHTSPPCP

SEQ ID NO: 742 - protein, 21 aa, Artificial Sequence
  Made in a lab
QRHNNSSLNTGTQMAGHSPNS

SEQ ID NO: 743 - protein, 21 aa, Artificial Sequence
  Made in a lab
QRHNNSSLNTGTQKARHSPNS

SEQ ID NO: 744 - protein, 21 aa, Artificial Sequence
  Made in a lab
QRHNNSSLNTGTQMARHSPNS

SEQ ID NO: 745 - protein, 21 aa, Artificial Sequence
  Made in a lab
QRHNNSSLNTRTQKAGHSPNS

SEQ ID NO: 746 - protein, 21 aa, Artificial Sequence
  Made in a lab
QRHNNSSLNTRTQMAGHSPNS

SEQ ID NO: 747 - protein, 21 aa, Artificial Sequence
  Made in a lab
QRHNNSSLNTRTQMARHSPNS

SEQ ID NO: 748 - protein, 10 aa, Artificial Sequence
  Hinge sequence
PPPPPCPPCP

SEQ ID NO: 749 - protein, 16 aa, Artificial Sequence
  Hinge sequence
TEPKSSDKTHTCPPCP

SEQ ID NO: 750 - protein, 20 aa, Artificial Sequence
  Hinge sequence
EPKSSDKTHTSPPSPCPPCP

SEQ ID NO: 751 - protein, 20 aa, Artificial Sequence
  Hinge sequence
EPKSSDTPPPSPRSPCPPCP

SEQ ID NO: 752 - protein, 23 aa, Artificial Sequence
  Hinge sequence
PSTPPTPSPSTPPTPSPSCPPCP

SEQ ID NO: 753 - protein, 23 aa, Artificial Sequence
  Hinge sequence
RTEPRVPITQNPCPPLKECPPCA

SEQ ID NO: 754 - protein, 39 aa, Artificial Sequence
  Hinge sequence
ESPKAQASSVPTAQPQAEGSLAKATTAPATTRNTCPPCP

SEQ ID NO: 755 - protein, 50 aa, Artificial Sequence
  Hinge sequence
QEKEAIERLKAAGAPESLVIQAYFASEKNENLAANFLLSQNFDDECPPCP

SEQ ID NO: 756 - protein, 52 aa, Artificial Sequence
  Hinge sequence
QEKEAIERLKAAGAPESLVIQAYFASEKNENLAANFLLSQNFDDECPPCPSG

SEQ ID NO: 757 - protein, 110 aa, Artificial Sequence
  Hinge sequence
SRDFTPPTVKILQSSSDGGGHFPPTIQLLCLVSGYTPGTINITWLEDGQVMDVDLSTASTTQEGELASTQSELTLSQKHWLSDRTYTCQVTYQGHTFEDSTKKSACPPCP

SEQ ID NO: 758 - protein, 111 aa, Artificial Sequence
  Hinge sequence
SRDFTPPTVKILQSSSDGGGHFPPTIQLLCLVSGYTPGTINITWLEDGQVMDVDLSTASTTQEGELASTQSELTLSQKHWLSDRTYTCQVTYQGHTFEDSTKKSACPPCSG

SEQ ID NO: 759 - protein, 116 aa, Artificial Sequence
  Hinge sequence
IAELPPKVSVFVPPRDGFFGNPRKSKLICQATGFSPRQIQVSWLREGKQVGSGVTTDQVQAEAKESGPTTYKVTSTLTIKESDWLGQSMFTCRVDHRGLTFQQNASSMSVPCPPCP

SEQ ID NO: 760 - DNA, 1086 bp, Artificial Sequence
  X0294 (hinge-CH2-CH3-Ck DAE)
atggaagcaccagcgcagcttctcttcctcctgctactctggctcccagataccaccggttccagcgagcccaaatcttctgacaaaactcacacatgcccaccgtgcccagcacctgaagccgcgggtgcaccgtcagtcttcctcttccccccaaaacccaaggacaccctcatgatctcccggacccctgaggtcacatgcgtggtggtggacgtgagccacgaagaccctgaggtcaagttcaactggtacgtggacggcgtggaggtgcataatgccaagacaaagccgcgggaggagcagtacaacagcacgtaccgtgtggtcagcgtcctcaccgtcctgcaccaggactggctgaatggcaaggcgtacgcgtgcgcggtctccaacaaagccctcccagcccccatcgagaaaaccatctccaaagccaaagggcagccccgagaaccacaggtgtacaccctgcccccatcccgggatgagctgaccaagaaccaggtcagcctgacctgcctggtcaaaggcttctatccaagcgacatcgccgtggagtgggagagcaatgggcagccggagaacaactacaagaccacgcctcccgtgctggactccgacggctccttcttcctctacagcaagctcaccgtggacaagagcaggtggcagcaggggaacgtcttctcatgctccgtgatgcatgaggctctgcacaaccactacacgcagaagagcctctccctgtctccgggtaaatctagaactgtggctgcaccatctgtcttcatcttcccgccatctgatgagcagttgaaatctggaactgcctctgttgtgtgcctgctgaatgacttctatcccagagaggccaaagtacagtggaaggtggataacgccctccaatcgggtaactcccaggagagtgccacagagcaggacagcaaggacagcacctacagcctcagcagcgagctgacgctgagcaaagcagactacgagaaacacaaagtctacgcctgcgaagtcacccatcagggcctgagctcgcccgtcacaaagagcttcaacaggggagagtga

SEQ ID NO: 761 - DNA, 1086 bp, Artificial Sequence
  X0296 (hinge-CH2-CH3-Ck MAE)
atggaagcaccagcgcagcttctcttcctcctgctactctggctcccagataccaccggttccagcgagcccaaatcttctgacaaaactcacacatgcccaccgtgcccagcacctgaagccgcgggtgcaccgtcagtcttcctcttccccccaaaacccaaggacaccctcatgatctcccggacccctgaggtcacatgcgtggtggtggacgtgagccacgaagaccctgaggtcaagttcaactggtacgtggacggcgtggaggtgcataatgccaagacaaagccgcgggaggagcagtacaacagcacgtaccgtgtggtcagcgtcctcaccgtcctgcaccaggactggctgaatggcaaggcgtacgcgtgcgcggtctccaacaaagccctcccagcccccatcgagaaaaccatctccaaagccaaagggcagccccgagaaccacaggtgtacaccctgcccccatcccgggatgagctgaccaagaaccaggtcagcctgacctgcctggtcaaaggcttctatccaagcgacatcgccgtggagtgggagagcaatgggcagccggagaacaactacaagaccacgcctcccgtgctggactccgacggctccttcttcctctacagcaagctcaccgtggacaagagcaggtggcagcaggggaacgtcttctcatgctccgtgatgcatgaggctctgcacaaccactacacgcagaagagcctctccctgtctccgggtaaatctagaactgtggctgcaccatctgtcttcatcttcccgccatctgatgagcagttgaaatctggaactgcctctgttgtgtgcctgctgaatatgttctatcccagagaggccaaagtacagtggaaggtggataacgccctccaatcgggtaactcccaggagagtgccacagagcaggacagcaaggacagcacctacagcctcagcagcgagctgacgctgagcaaagcagactacgagaaacacaaagtctacgcctgcgaagtcacccatcagggcctgagctcgcccgtcacaaagagcttcaacaggggagagtga

SEQ ID NO: 762 - DNA, 1086 bp, Artificial Sequence
  X0297 (hinge-CH2-CH3-Ck SAE)
atggaagcaccagcgcagcttctcttcctcctgctactctggctcccagataccaccggttccagcgagcccaaatcttctgacaaaactcacacatgcccaccgtgcccagcacctgaagccgcgggtgcaccgtcagtcttcctcttccccccaaaacccaaggacaccctcatgatctcccggacccctgaggtcacatgcgtggtggtggacgtgagccacgaagaccctgaggtcaagttcaactggtacgtggacggcgtggaggtgcataatgccaagacaaagccgcgggaggagcagtacaacagcacgtaccgtgtggtcagcgtcctcaccgtcctgcaccaggactggctgaatggcaaggcgtacgcgtgcgcggtctccaacaaagccctcccagcccccatcgagaaaaccatctccaaagccaaagggcagccccgagaaccacaggtgtacaccctgcccccatcccgggatgagctgaccaagaaccaggtcagcctgacctgcctggtcaaaggcttctatccaagcgacatcgccgtggagtgggagagcaatgggcagccggagaacaactacaagaccacgcctcccgtgctggactccgacggctccttcttcctctacagcaagctcaccgtggacaagagcaggtggcagcaggggaacgtcttctcatgctccgtgatgcatgaggctctgcacaaccactacacgcagaagagcctctccctgtctccgggtaaatctagaactgtggctgcaccatctgtcttcatcttcccgccatctgatgagcagttgaaatctggaactgcctctgttgtgtgcctgctgaatagcttctatcccagagaggccaaagtacagtggaaggtggataacgccctccaatcgggtaactcccaggagagtgccacagagcaggacagcaaggacagcacctacagcctcagcagcgagctgacgctgagcaaagcagactacgagaaacacaaagtctacgcctgcgaagtcacccatcagggcctgagctcgcccgtcacaaagagcttcaacaggggagagtga

SEQ ID NO: 763 - DNA, 1086 bp, Artificial Sequence
  X0298 (hinge-CH2-CH3-Ck FAE)
atggaagcaccagcgcagcttctcttcctcctgctactctggctcccagataccaccggttccagcgagcccaaatcttctgacaaaactcacacatgcccaccgtgcccagcacctgaagccgcgggtgcaccgtcagtcttcctcttccccccaaaacccaaggacaccctcatgatctcccggacccctgaggtcacatgcgtggtggtggacgtgagccacgaagaccctgaggtcaagttcaactggtacgtggacggcgtggaggtgcataatgccaagacaaagccgcgggaggagcagtacaacagcacgtaccgtgtggtcagcgtcctcaccgtcctgcaccaggactggctgaatggcaaggcgtacgcgtgcgcggtctccaacaaagccctcccagcccccatcgagaaaaccatctccaaagccaaagggcagccccgagaaccacaggtgtacaccctgcccccatcccgggatgagctgaccaagaaccaggtcagcctgacctgcctggtcaaaggcttctatccaagcgacatcgccgtggagtgggagagcaatgggcagccggagaacaactacaagaccacgcctcccgtgctggactccgacggctccttcttcctctacagcaagctcaccgtggacaagagcaggtggcagcaggggaacgtcttctcatgctccgtgatgcatgaggctctgcacaaccactacacgcagaagagcctctccctgtctccgggtaaatctagaactgtggctgcaccatctgtcttcatcttcccgccatctgatgagcagttgaaatctggaactgcctctgttgtgtgcctgctgaatttcttctatcccagagaggccaaagtacagtggaaggtggataacgccctccaatcgggtaactcccaggagagtgccacagagcaggacagcaaggacagcacctacagcctcagcagcgagctgacgctgagcaaagcagactacgagaaacacaaagtctacgcctgcgaagtcacccatcagggcctgagctcgcccgtcacaaagagcttcaacaggggagagtga

SEQ ID NO: 764 - DNA, 1800 bp, Artificial Sequence
  X0303 (Cris7 scFv-hinge-CH2-CH3-CH1)
atggaagcaccagcgcagcttctcttcctcctgctactctggctcccagataccaccggtcaggtccagctggtgcagtctgggggcggagtggtgcagcctgggcggtcactgaggctgtcctgcaaggcttctggctacacctttactagatctacgatgcactgggtaaggcaggcccctggaaagggtctggaatggattggatacattaatcctagcagtgcttatactaattacaatcagaaattcaaggacaggttcacaatcagcgcagacaaatccaagagcacagccttcctgcagatggacagcctgaggcccgaggacaccggcgtctatttctgtgcacggccccaagtccactatgattacaacgggtttccttactggggccaagggactcccgtcactgtctctagcggtggcggagggtctgggggtggcggatccggaggtggtggctctgcacaagacatccagatgacccagtctccaagcagcctgtctgcaagcgtgggggacagggtcaccatgacctgcagtgccagctcaagtgtaagttacatgaactggtaccagcagaagcccggcaaggcccccaaaagatggatttatgactcatccaaactggcttctggagtccctgctcgcttcagtggcagtgggtctgggaccgactataccctcacaatcagcagcctgcagcccgaagatttcgccacttattactgccagcagtggagtcgtaacccacccacgttcggaggggggaccaagctacaaattacacgctcgagtgagcccaaatcttctgacaaaactcacacatgcccaccgtgcccagcacctgaagccgcgggtgcaccgtcagtcttcctcttccccccaaaacccaaggacaccctcatgatctcccggacccctgaggtcacatgcgtggtggtggacgtgagccacgaagaccctgaggtcaagttcaactggtacgtggacggcgtggaggtgcataatgccaagacaaagccgcgggaggagcagtacaacagcacgtaccgtgtggtcagcgtcctcaccgtcctgcaccaggactggctgaatggcaaggcgtacgcgtgcgcggtctccaacaaagccctcccagcccccatcgagaaaaccatctccaaagccaaagggcagccccgagaaccacaggtgtacaccctgcccccatcccgggatgagctgaccaagaaccaggtcagcctgacctgcctggtcaaaggcttctatccaagcgacatcgccgtggagtgggagagcaatgggcagccggagaacaactacaagaccacgcctcccgtgctggactccgacggctccttcttcctctacagcaagctcaccgtggacaagagcaggtggcagcaggggaacgtcttctcatgctccgtgatgcatgaggctctgcacaaccactacacgcagaagagcctctccctgtctccgggtaaatctagagcctccaccaagggcccatcggtcttccccctggcaccctcctccaagagcacctctgggggcacagcggccctgggctgcctggtcaaggactacttccccgagccggtgacggtgtcgtggaactcaggcgccctgaccagcggcgtgcacaccttcccggctgtcctacagtcctcaggactctactccctcagcagcgtggtgaccgtgccctccagcagcttgggcacccagacctacatctgcaacgtgaatcacaagcccagcaacaccaaggtggacaagaaagtttga

SEQ ID NO: 765 - protein, 341 aa, Artificial Sequence
  X0294 (hinge-CH2-CH3-Ck DAE)
SSEPKSSDKTHTCPPCPAPEAAGAPSVFLFPPKPKDTLMISRTPEVTCVVVDVSHEDPEVKFNWYVDGVEVHNAKTKPREEQYNSTYRVVSVLTVLHQDWLNGKAYACAVSNKALPAPIEKTISKAKGQPREPQVYTLPPSRDELTKNQVSLTCLVKGFYPSDIAVEWESNGQPENNYKTTPPVLDSDGSFFLYSKLTVDKSRWQQGNVFSCSVMHEALHNHYTQKSLSLSPGKSRTVAAPSVFIFPPSDEQLKSGTASVVCLLNDFYPREAKVQWKVDNALQSGNSQESATEQDSKDSTYSLSSELTLSKADYEKHKVYACEVTHQGLSSPVTKSFNRGE

SEQ ID NO: 766 - protein, 341 aa, Artificial Sequence
  X0296 (hinge-CH2-CH3-Ck MAE)
SSEPKSSDKTHTCPPCPAPEAAGAPSVFLFPPKPKDTLMISRTPEVTCVVVDVSHEDPEVKFNWYVDGVEVHNAKTKPREEQYNSTYRVVSVLTVLHQDWLNGKAYACAVSNKALPAPIEKTISKAKGQPREPQVYTLPPSRDELTKNQVSLTCLVKGFYPSDIAVEWESNGQPENNYKTTPPVLDSDGSFFLYSKLTVDKSRWQQGNVFSCSVMHEALHNHYTQKSLSLSPGKSRTVAAPSVFIFPPSDEQLKSGTASVVCLLNMFYPREAKVQWKVDNALQSGNSQESATEQDSKDSTYSLSSELTLSKADYEKHKVYACEVTHQGLSSPVTKSFNRGE

SEQ ID NO: 767 - protein, 341 aa, Artificial Sequence
  X0297 (hinge-CH2-CH3-Ck SAE)
SSEPKSSDKTHTCPPCPAPEAAGAPSVFLFPPKPKDTLMISRTPEVTCVVVDVSHEDPEVKFNWYVDGVEVHNAKTKPREEQYNSTYRVVSVLTVLHQDWLNGKAYACAVSNKALPAPIEKTISKAKGQPREPQVYTLPPSRDELTKNQVSLTCLVKGFYPSDIAVEWESNGQPENNYKTTPPVLDSDGSFFLYSKLTVDKSRWQQGNVFSCSVMHEALHNHYTQKSLSLSPGKSRTVAAPSVFIFPPSDEQLKSGTASVVCLLNSFYPREAKVQWKVDNALQSGNSQESATEQDSKDSTYSLSSELTLSKADYEKHKVYACEVTHQGLSSPVTKSFNRGE

SEQ ID NO: 768 - protein, 341 aa, Artificial Sequence
  X0298 (hinge-CH2-CH3-Ck FAE)
SSEPKSSDKTHTCPPCPAPEAAGAPSVFLFPPKPKDTLMISRTPEVTCVVVDVSHEDPEVKFNWYVDGVEVHNAKTKPREEQYNSTYRVVSVLTVLHQDWLNGKAYACAVSNKALPAPIEKTISKAKGQPREPQVYTLPPSRDELTKNQVSLTCLVKGFYPSDIAVEWESNGQPENNYKTTPPVLDSDGSFFLYSKLTVDKSRWQQGNVFSCSVMHEALHNHYTQKSLSLSPGKSRTVAAPSVFIFPPSDEQLKSGTASVVCLLNFFYPREAKVQWKVDNALQSGNSQESATEQDSKDSTYSLSSELTLSKADYEKHKVYACEVTHQGLSSPVTKSFNRGE

SEQ ID NO: 769 - protein, 579 aa, Artificial Sequence
  X0303 (Cris7 scFv-hinge-CH2-CH3-CH1)
QVQLVQSGGGVVQPGRSLRLSCKASGYTFTRSTMHWVRQAPGKGLEWIGYINPSSAYTNYNQKFKDRFTISADKSKSTAFLQMDSLRPEDTGVYFCARPQVHYDYNGFPYWGQGTPVTVSSGGGGSGGGGSGGGGSAQDIQMTQSPSSLSASVGDRVTMTCSASSSVSYMNWYQQKPGKAPKRWIYDSSKLASGVPARFSGSGSGTDYTLTISSLQPEDFATYYCQQWSRNPPTFGGGTKLQITRSSEPKSSDKTHTCPPCPAPEAAGAPSVFLFPPKPKDTLMISRTPEVTCVVVDVSHEDPEVKFNWYVDGVEVHNAKTKPREEQYNSTYRVVSVLTVLHQDWLNGKAYACAVSNKALPAPIEKTISKAKGQPREPQVYTLPPSRDELTKNQVSLTCLVKGFYPSDIAVEWESNGQPENNYKTTPPVLDSDGSFFLYSKLTVDKSRWQQGNVFSCSVMHEALHNHYTQKSLSLSPGKSRASTKGPSVFPLAPSSKSTSGGTAALGCLVKDYFPEPVTVSWNSGALTSGVHTFPAVLQSSGLYSLSSVVTVPSSSLGTQTYICNVNHKPSNTKVDKKV

SEQ ID NO: 770 - protein, 105 aa, Artificial Sequence
  mutated human Ck DAE
TVAAPSVFIFPPSDEQLKSGTASVVCLLNDFYPREAKVQWKVDNALQSGNSQESATEQDSKDSTYSLSSELTLSKADYEKHKVYACEVTHQGLSSPVTKSFNRGE

SEQ ID NO: 771 - protein, 105 aa, Artificial Sequence
  mutated human Ck MAE
TVAAPSVFIFPPSDEQLKSGTASVVCLLNMFYPREAKVQWKVDNALQSGNSQESATEQDSKDSTYSLSSELTLSKADYEKHKVYACEVTHQGLSSPVTKSFNRGE

SEQ ID NO: 772 - protein, 105 aa, Artificial Sequence
  mutated human Ck SAE
TVAAPSVFIFPPSDEQLKSGTASVVCLLNSFYPREAKVQWKVDNALQSGNSQESATEQDSKDSTYSLSSELTLSKADYEKHKVYACEVTHQGLSSPVTKSFNRGE

SEQ ID NO: 773 - protein, 105 aa, Artificial Sequence
  mutated human FAE
TVAAPSVFIFPPSDEQLKSGTASVVCLLNFFYPREAKVQWKVDNALQSGNSQESATEQDSKDSTYSLSSELTLSKADYEKHKVYACEVTHQGLSSPVTKSFNRGE

SEQ ID NO: 774 - DNA, 1086 bp, Artificial Sequence
  X0299 (hinge-CH2-CH3-Ck L27E)
atggaagcaccagcgcagcttctcttcctcctgctactctggctcccagataccaccggttccagcgagcccaaatcttctgacaaaactcacacatgcccaccgtgcccagcacctgaagccgcgggtgcaccgtcagtcttcctcttccccccaaaacccaaggacaccctcatgatctcccggacccctgaggtcacatgcgtggtggtggacgtgagccacgaagaccctgaggtcaagttcaactggtacgtggacggcgtggaggtgcataatgccaagacaaagccgcgggaggagcagtacaacagcacgtaccgtgtggtcagcgtcctcaccgtcctgcaccaggactggctgaatggcaaggcgtacgcgtgcgcggtctccaacaaagccctcccagcccccatcgagaaaaccatctccaaagccaaagggcagccccgagaaccacaggtgtacaccctgcccccatcccgggatgagctgaccaagaaccaggtcagcctgacctgcctggtcaaaggcttctatccaagcgacatcgccgtggagtgggagagcaatgggcagccggagaacaactacaagaccacgcctcccgtgctggactccgacggctccttcttcctctacagcaagctcaccgtggacaagagcaggtggcagcaggggaacgtcttctcatgctccgtgatgcatgaggctctgcacaaccactacacgcagaagagcctctccctgtctccgggtaaatctagaactgtggctgcaccatctgtcttcatcttcccgccatctgatgagcagttgaaatctggaactgcctctgttgtgtgcgagctgaataacttctatcccagagaggccaaagtacagtggaaggtggataacgccctccaatcgggtaactcccaggagagtgtcacagagcaggacagcaaggacagcacctacagcctcagcagcaccctgacgctgagcaaagcagactacgagaaacacaaagtctacgcctgcgaagtcacccatcagggcctgagctcgcccgtcacaaagagcttcaacaggggagagtga

SEQ ID NO: 775 - DNA, 1086 bp, Artificial Sequence
  X0300 (hinge-CH2-CH3-Ck L27K)
atggaagcaccagcgcagcttctcttcctcctgctactctggctcccagataccaccggttccagcgagcccaaatcttctgacaaaactcacacatgcccaccgtgcccagcacctgaagccgcgggtgcaccgtcagtcttcctcttccccccaaaacccaaggacaccctcatgatctcccggacccctgaggtcacatgcgtggtggtggacgtgagccacgaagaccctgaggtcaagttcaactggtacgtggacggcgtggaggtgcataatgccaagacaaagccgcgggaggagcagtacaacagcacgtaccgtgtggtcagcgtcctcaccgtcctgcaccaggactggctgaatggcaaggcgtacgcgtgcgcggtctccaacaaagccctcccagcccccatcgagaaaaccatctccaaagccaaagggcagccccgagaaccacaggtgtacaccctgcccccatcccgggatgagctgaccaagaaccaggtcagcctgacctgcctggtcaaaggcttctatccaagcgacatcgccgtggagtgggagagcaatgggcagccggagaacaactacaagaccacgcctcccgtgctggactccgacggctccttcttcctctacagcaagctcaccgtggacaagagcaggtggcagcaggggaacgtcttctcatgctccgtgatgcatgaggctctgcacaaccactacacgcagaagagcctctccctgtctccgggtaaatctagaactgtggctgcaccatctgtcttcatcttcccgccatctgatgagcagttgaaatctggaactgcctctgttgtgtgcaagctgaataacttctatcccagagaggccaaagtacagtggaaggtggataacgccctccaatcgggtaactcccaggagagtgtcacagagcaggacagcaaggacagcacctacagcctcagcagcaccctgacgctgagcaaagcagactacgagaaacacaaagtctacgcctgcgaagtcacccatcagggcctgagctcgcccgtcacaaagagcttcaacaggggagagtga

SEQ ID NO: 776 - DNA, 1800 bp, Artificial Sequence
  X0301 (Cris7 scFv-hinge-CH2-CH3-CH1 V68E)
atggaagcaccagcgcagcttctcttcctcctgctactctggctcccagataccaccggtcaggtccagctggtgcagtctgggggcggagtggtgcagcctgggcggtcactgaggctgtcctgcaaggcttctggctacacctttactagatctacgatgcactgggtaaggcaggcccctggaaagggtctggaatggattggatacattaatcctagcagtgcttatactaattacaatcagaaattcaaggacaggttcacaatcagcgcagacaaatccaagagcacagccttcctgcagatggacagcctgaggcccgaggacaccggcgtctatttctgtgcacggccccaagtccactatgattacaacgggtttccttactggggccaagggactcccgtcactgtctctagcggtggcggagggtctgggggtggcggatccggaggtggtggctctgcacaagacatccagatgacccagtctccaagcagcctgtctgcaagcgtgggggacagggtcaccatgacctgcagtgccagctcaagtgtaagttacatgaactggtaccagcagaagcccggcaaggcccccaaaagatggatttatgactcatccaaactggcttctggagtccctgctcgcttcagtggcagtgggtctgggaccgactataccctcacaatcagcagcctgcagcccgaagatttcgccacttattactgccagcagtggagtcgtaacccacccacgttcggaggggggaccaagctacaaattacacgctcgagtgagcccaaatcttctgacaaaactcacacatgcccaccgtgcccagcacctgaagccgcgggtgcaccgtcagtcttcctcttccccccaaaacccaaggacaccctcatgatctcccggacccctgaggtcacatgcgtggtggtggacgtgagccacgaagaccctgaggtcaagttcaactggtacgtggacggcgtggaggtgcataatgccaagacaaagccgcgggaggagcagtacaacagcacgtaccgtgtggtcagcgtcctcaccgtcctgcaccaggactggctgaatggcaaggcgtacgcgtgcgcggtctccaacaaagccctcccagcccccatcgagaaaaccatctccaaagccaaagggcagccccgagaaccacaggtgtacaccctgcccccatcccgggatgagctgaccaagaaccaggtcagcctgacctgcctggtcaaaggcttctatccaagcgacatcgccgtggagtgggagagcaatgggcagccggagaacaactacaagaccacgcctcccgtgctggactccgacggctccttcttcctctacagcaagctcaccgtggacaagagcaggtggcagcaggggaacgtcttctcatgctccgtgatgcatgaggctctgcacaaccactacacgcagaagagcctctccctgtctccgggtaaatctagagcctccaccaagggcccatcggtcttccccctggcaccctcctccaagagcacctctgggggcacagcggccctgggctgcctggtcaaggactacttccccgagccggtgacggtgtcgtggaactcaggcgccctgaccagcggcgtgcacaccttcccggctgtcctacagtcctcaggactctactccctcagcagcgaggtgaccgtgccctccagcagcttgggcacccagacctacatctgcaacgtgaatcacaagcccagcaacaccaaggtggacaagaaagtttga

SEQ ID NO: 777 - DNA, 1800 bp, Artificial Sequence
  X0302 (Cris7 scFv-hinge-CH2-CH3-CH1 V68K)
atggaagcaccagcgcagcttctcttcctcctgctactctggctcccagataccaccggtcaggtccagctggtgcagtctgggggcggagtggtgcagcctgggcggtcactgaggctgtcctgcaaggcttctggctacacctttactagatctacgatgcactgggtaaggcaggcccctggaaagggtctggaatggattggatacattaatcctagcagtgcttatactaattacaatcagaaattcaaggacaggttcacaatcagcgcagacaaatccaagagcacagccttcctgcagatggacagcctgaggcccgaggacaccggcgtctatttctgtgcacggccccaagtccactatgattacaacgggtttccttactggggccaagggactcccgtcactgtctctagcggtggcggagggtctgggggtggcggatccggaggtggtggctctgcacaagacatccagatgacccagtctccaagcagcctgtctgcaagcgtgggggacagggtcaccatgacctgcagtgccagctcaagtgtaagttacatgaactggtaccagcagaagcccggcaaggcccccaaaagatggatttatgactcatccaaactggcttctggagtccctgctcgcttcagtggcagtgggtctgggaccgactataccctcacaatcagcagcctgcagcccgaagatttcgccacttattactgccagcagtggagtcgtaacccacccacgttcggaggggggaccaagctacaaattacacgctcgagtgagcccaaatcttctgacaaaactcacacatgcccaccgtgcccagcacctgaagccgcgggtgcaccgtcagtcttcctcttccccccaaaacccaaggacaccctcatgatctcccggacccctgaggtcacatgcgtggtggtggacgtgagccacgaagaccctgaggtcaagttcaactggtacgtggacggcgtggaggtgcataatgccaagacaaagccgcgggaggagcagtacaacagcacgtaccgtgtggtcagcgtcctcaccgtcctgcaccaggactggctgaatggcaaggcgtacgcgtgcgcggtctccaacaaagccctcccagcccccatcgagaaaaccatctccaaagccaaagggcagccccgagaaccacaggtgtacaccctgcccccatcccgggatgagctgaccaagaaccaggtcagcctgacctgcctggtcaaaggcttctatccaagcgacatcgccgtggagtgggagagcaatgggcagccggagaacaactacaagaccacgcctcccgtgctggactccgacggctccttcttcctctacagcaagctcaccgtggacaagagcaggtggcagcaggggaacgtcttctcatgctccgtgatgcatgaggctctgcacaaccactacacgcagaagagcctctccctgtctccgggtaaatctagagcctccaccaagggcccatcggtcttccccctggcaccctcctccaagagcacctctgggggcacagcggccctgggctgcctggtcaaggactacttccccgagccggtgacggtgtcgtggaactcaggcgccctgaccagcggcgtgcacaccttcccggctgtcctacagtcctcaggactctactccctcagcagcaaggtgaccgtgccctccagcagcttgggcacccagacctacatctgcaacgtgaatcacaagcccagcaacaccaaggtggacaagaaagtttga

SEQ ID NO: 778 - protein, 341 aa, Artificial Sequence
  X0299 (hinge-CH2-CH3-Ck L27E)
SSEPKSSDKTHTCPPCPAPEAAGAPSVFLFPPKPKDTLMISRTPEVTCVVVDVSHEDPEVKFNWYVDGVEVHNAKTKPREEQYNSTYRVVSVLTVLHQDWLNGKAYACAVSNKALPAPIEKTISKAKGQPREPQVYTLPPSRDELTKNQVSLTCLVKGFYPSDIAVEWESNGQPENNYKTTPPVLDSDGSFFLYSKLTVDKSRWQQGNVFSCSVMHEALHNHYTQKSLSLSPGKSRTVAAPSVFIFPPSDEQLKSGTASVVCELNNFYPREAKVQWKVDNALQSGNSQESVTEQDSKDSTYSLSSTLTLSKADYEKHKVYACEVTHQGLSSPVTKSFNRGE

SEQ ID NO: 779 - protein, 341 aa, Artificial Sequence
  X0300 (hinge-CH2-CH3-Ck L27K)
SSEPKSSDKTHTCPPCPAPEAAGAPSVFLFPPKPKDTLMISRTPEVTCVVVDVSHEDPEVKFNWYVDGVEVHNAKTKPREEQYNSTYRVVSVLTVLHQDWLNGKAYACAVSNKALPAPIEKTISKAKGQPREPQVYTLPPSRDELTKNQVSLTCLVKGFYPSDIAVEWESNGQPENNYKTTPPVLDSDGSFFLYSKLTVDKSRWQQGNVFSCSVMHEALHNHYTQKSLSLSPGKSRTVAAPSVFIFPPSDEQLKSGTASVVCKLNNFYPREAKVQWKVDNALQSGNSQESVTEQDSKDSTYSLSSTLTLSKADYEKHKVYACEVTHQGLSSPVTKSFNRGE

SEQ ID NO: 780 - protein, 579 aa, Artificial Sequence
  X0301 (Cris7 scFv-hinge-CH2-CH3-CH1 V68E)
QVQLVQSGGGVVQPGRSLRLSCKASGYTFTRSTMHWVRQAPGKGLEWIGYINPSSAYTNYNQKFKDRFTISADKSKSTAFLQMDSLRPEDTGVYFCARPQVHYDYNGFPYWGQGTPVTVSSGGGGSGGGGSGGGGSAQDIQMTQSPSSLSASVGDRVTMTCSASSSVSYMNWYQQKPGKAPKRWIYDSSKLASGVPARFSGSGSGTDYTLTISSLQPEDFATYYCQQWSRNPPTFGGGTKLQITRSSEPKSSDKTHTCPPCPAPEAAGAPSVFLFPPKPKDTLMISRTPEVTCVVVDVSHEDPEVKFNWYVDGVEVHNAKTKPREEQYNSTYRVVSVLTVLHQDWLNGKAYACAVSNKALPAPIEKTISKAKGQPREPQVYTLPPSRDELTKNQVSLTCLVKGFYPSDIAVEWESNGQPENNYKTTPPVLDSDGSFFLYSKLTVDKSRWQQGNVFSCSVMHEALHNHYTQKSLSLSPGKSRASTKGPSVFPLAPSSKSTSGGTAALGCLVKDYFPEPVTVSWNSGALTSGVHTFPAVLQSSGLYSLSSEVTVPSSSLGTQTYICNVNHKPSNTKVDKKV

SEQ ID NO: 781 - protein, 579 aa, Artificial Sequence
  X0302 (Cris7 scFv-hinge-CH2-CH3-CH1 V68K)
QVQLVQSGGGVVQPGRSLRLSCKASGYTFTRSTMHWVRQAPGKGLEWIGYINPSSAYTNYNQKFKDRFTISADKSKSTAFLQMDSLRPEDTGVYFCARPQVHYDYNGFPYWGQGTPVTVSSGGGGSGGGGSGGGGSAQDIQMTQSPSSLSASVGDRVTMTCSASSSVSYMNWYQQKPGKAPKRWIYDSSKLASGVPARFSGSGSGTDYTLTISSLQPEDFATYYCQQWSRNPPTFGGGTKLQITRSSEPKSSDKTHTCPPCPAPEAAGAPSVFLFPPKPKDTLMISRTPEVTCVVVDVSHEDPEVKFNWYVDGVEVHNAKTKPREEQYNSTYRVVSVLTVLHQDWLNGKAYACAVSNKALPAPIEKTISKAKGQPREPQVYTLPPSRDELTKNQVSLTCLVKGFYPSDIAVEWESNGQPENNYKTTPPVLDSDGSFFLYSKLTVDKSRWQQGNVFSCSVMHEALHNHYTQKSLSLSPGKSRASTKGPSVFPLAPSSKSTSGGTAALGCLVKDYFPEPVTVSWNSGALTSGVHTFPAVLQSSGLYSLSSKVTVPSSSLGTQTYICNVNHKPSNTKVDKKV

SEQ ID NO: 782 - protein, 105 aa, Artificial Sequence
  mutated Ck L27E
TVAAPSVFIFPPSDEQLKSGTASVVCELNNFYPREAKVQWKVDNALQSGNSQESVTEQDSKDSTYSLSSTLTLSKADYEKHKVYACEVTHQGLSSPVTKSFNRGE

SEQ ID NO: 783 - protein, 105 aa, Artificial Sequence
  mutated Ck L27K
TVAAPSVFIFPPSDEQLKSGTASVVCKLNNFYPREAKVQWKVDNALQSGNSQESVTEQDSKDSTYSLSSTLTLSKADYEKHKVYACEVTHQGLSSPVTKSFNRGE

SEQ ID NO: 784 - protein, 98 aa, Artificial Sequence
  mutated CH1 V68E
ASTKGPSVFPLAPSSKSTSGGTAALGCLVKDYFPEPVTVSWNSGALTSGVHTFPAVLQSSGLYSLSSEVTVPSSSLGTQTYICNVNHKPSNTKVDKKV

SEQ ID NO: 785 - protein, 98 aa, Artificial Sequence
  mutated CH1 V68K
ASTKGPSVFPLAPSSKSTSGGTAALGCLVKDYFPEPVTVSWNSGALTSGVHTFPAVLQSSGLYSLSSKVTVPSSSLGTQTYICNVNHKPSNTKVDKKV

SEQ ID NO: 786 - protein, 245 aa, Artificial Sequence
  HuCris7 (VH3-VL1) scFv
QVQLVQSGGGVVQPGRSLRLSCKASGYTFTRSTMHWVRQAPGKGLEWIGYINPSSAYTNYNQKFKDRFTISADKSKSTAFLQMDSLRPEDTGVYFCARPQVHYDYNGFPYWGQGTPVTVSSGGGGSGGGGSGGGGSAQDIQMTQSPSSLSASVGDRVTMTCSASSSVSYMNWYQQKPGKAPKRWIYDSSKLASGVPARFSGSGSGTDYTLTISSLQPEDFATYYCQQWSRNPPTFGGGTKLQITR

SEQ ID NO: 787 - protein, 3 aa, Artificial Sequence
  CH3-CH1 linker or CH3-Ck linker
KSR

SEQ ID NO: 788 - protein, 5 aa, Artificial Sequence
  CH3-CH1 linker
GGGSS

SEQ ID NO: 789 - protein, 6 aa, Artificial Sequence
  CH3-CH1 linker
SYSPNS

SEQ ID NO: 790 - protein, 8 aa, Artificial Sequence
  CH3-CH1 linker
SSLNTPNS

SEQ ID NO: 791 - protein, 5 aa, Artificial Sequence
  CH3-Ck linker
GGGSR

SEQ ID NO: 792 - protein, 7 aa, Artificial Sequence
  CH3-Ck linker
SYSPNSR

SEQ ID NO: 793 - protein, 9 aa, Artificial Sequence
  CH3-Ck linker
SSLNTPNSR

SEQ ID NO: 794 - protein, 106 aa, Homo sapiens [sequence omitted]

SEQ ID NO: 795 - protein, 216 aa, Artificial Sequence
  IgG1 CH2 CH3 Null2 desLys
APEAAGAPSVFLFPPKPKDTLMISRTPEVTCVVVDVSHEDPEVKFNWYVDGVEVHNAKTKPREEQYNSTYRVVSVLTVLHQDWLNGKAYACAVSNKALPAPIEKTISKAKGQPREPQVYTLPPSRDELTKNQVSLTCLVKGFYPSDIAVEWESNGQPENNYKTTPPVLDSDGSFFLYSKLTVDKSRWQQGNVFSCSVMHEALHNHYTQKSLSLSPG

SEQ ID NO: 796 - protein, 7 aa, Artificial Sequence
  Peptide linker
SPPSPNS

SEQ ID NO: 797 - protein, 17 aa, Artificial Sequence
  Peptide linker
EPTSTDKTHTSPPSPNS

SEQ ID NO: 798 - protein, 17 aa, Artificial Sequence
  Peptide linker
EPTSTDKTHTCPPCPNS

SEQ ID NO: 799 - protein, 16 aa, Artificial Sequence
  Peptide linker
NQEVQIPLTESYSPNS

SEQ ID NO: 800 - protein, 20 aa, Artificial Sequence
  Peptide linker
NSGANQEVQIPLTESYSPNS

SEQ ID NO: 801 - protein, 14 aa, Artificial Sequence
  Peptide linker
EVQIPLTESYSPNS

SEQ ID NO: 802 - protein, 20 aa, Artificial Sequence
  Peptide linker
NSGFNQEVQIPLTESYSPNS

SEQ ID NO: 803 - protein, 20 aa, Artificial Sequence
  Peptide linker
NSLANQEVQIPLTESYSPNS

SEQ ID NO: 804 - protein, 20 aa, Artificial Sequence
  Peptide linker
NSLFSQEVQIPLTESYSPNS

SEQ ID NO: 805 - protein, 20 aa, Artificial Sequence
  Peptide linker
NSLASQEVQIPLTESYSPNS

SEQ ID NO: 806 - protein, 26 aa, Artificial Sequence
  Peptide linker
EQKLSNMENRLKPFFTSGSADTSPNS

SEQ ID NO: 807 - protein, 21 aa, Artificial Sequence
  Peptide linker
QRHANSALNTGTQMAGHSPNS

SEQ ID NO: 808 - protein, 21 aa, Artificial Sequence
  Peptide linker
QRHNAASLNTGTQMAGHSPNS

SEQ ID NO: 809 - protein, 21 aa, Artificial Sequence
  Peptide linker
QRHAASSLNTGTQMAGHSPNS

SEQ ID NO: 810 - protein, 19 aa, Artificial Sequence
  Peptide linker
QRHSSLNTGTQMAGHSPNS

SEQ ID NO: 811 - protein, 21 aa, Artificial Sequence
  Peptide linker
QRHGGSSLNTGTQMAGHSPNS

SEQ ID NO: 812 - protein, 11 aa, Artificial Sequence
  Peptide linker
HDGSSLNTPNS

SEQ ID NO: 813 - protein, 16 aa, Artificial Sequence
  Peptide linker
SSLNTGTQMAGHSPNS

SEQ ID NO: 814 - protein, 16 aa, Artificial Sequence
  Peptide linker
SSLNTRTQMAGHSPNS

SEQ ID NO: 815 - protein, 16 aa, Artificial Sequence
  Peptide linker
SSLNTGTQMARHSPNS

SEQ ID NO: 816 - protein, 16 aa, Artificial Sequence
  Peptide linker
SSLNTGTQKAGHSPNS

SEQ ID NO: 817 - protein, 16 aa, Artificial Sequence
  Peptide linker
SSLNTGTQKARHSPNS

SEQ ID NO: 818 - protein, 16 aa, Artificial Sequence
  Peptide linker
SSLNTRTQMARHSPNS

SEQ ID NO: 819 - protein, 16 aa, Artificial Sequence
  Peptide linker
SSLNTRTQKAGHSPNS

SEQ ID NO: 820 - protein, 17 aa, Artificial Sequence
  Peptide linker
NSLFNQEVQIPLTEPNS

SEQ ID NO: 821 - protein, 14 aa, Artificial Sequence
  Peptide linker
NSLFNQEVQIPPNS

SEQ ID NO: 822 - protein, 11 aa, Artificial Sequence
  Peptide linker
NSLFNQEVPNS

SEQ ID NO: 823 - protein, 13 aa, Artificial Sequence
  Peptide linker
QRHNNSSLNTPNS

SEQ ID NO: 824 - protein, 19 aa, Artificial Sequence
  Peptide linker
SGGGGSGGGGSGGGGSPNS

SEQ ID NO: 825 - protein, 20 aa, Artificial Sequence
  H68 linker (scorpion linker derived from NKG2D)
NSLFNQEVQIPLTESYSPNS

SEQ ID NO: 826 - protein, 15 aa, Artificial Sequence
  Linker 134
EPMSCDKTHTCPPCP

SEQ ID NO: 827 - protein, 15 aa, Artificial Sequence
  Linker 135
EPMSSDKTHTCPPCP

SEQ ID NO: 828 - protein, 15 aa, Artificial Sequence
  Linker 136
EPMSCDKTHTSPPCP

SEQ ID NO: 829 - protein, 15 aa, Artificial Sequence
  Linker 137
EPMSCDKTHTCPPSP

SEQ ID NO: 830 - protein, 15 aa, Artificial Sequence
  Linker 138
EPMSSDKTHTSPPCP

SEQ ID NO: 831 - protein, 15 aa, Artificial Sequence
  Linker 139
EPMSSDKTHTCPPSP

SEQ ID NO: 832 - protein, 15 aa, Artificial Sequence
  Linker 140
EPMSCDKTHTSPPSP

SEQ ID NO: 833 - protein, 15 aa, Artificial Sequence
  Linker 141
EPMSCDKTHTCPPCS

SEQ ID NO: 834 - protein, 15 aa, Artificial Sequence
  Linker 142
EPMSSDKTHTCPPCS

SEQ ID NO: 835 - protein, 15 aa, Artificial Sequence
  Linker 143
EPMSCDKTHTSPPCS

SEQ ID NO: 836 - protein, 15 aa, Artificial Sequence
  Linker 144
EPMSCDKTHTCPPSS

SEQ ID NO: 837 - protein, 15 aa, Artificial Sequence
  Linker 145
EPMSSDKTHTSPPCS

SEQ ID NO: 838 - protein, 15 aa, Artificial Sequence
  Linker 146
EPMSSDKTHTCPPSP

SEQ ID NO: 839 - protein, 15 aa, Artificial Sequence
  Linker 147
EPMSCDKTHTSPPSS

SEQ ID NO: 840 - protein, 15 aa, Artificial Sequence
  Linker 148
EPTSCDKTHTCPPCP

SEQ ID NO: 841 - protein, 15 aa, Artificial Sequence
  Linker 149
EPTSSDKTHTCPPCP

SEQ ID NO: 842 - protein, 15 aa, Artificial Sequence
  Linker 150
EPTSCDKTHTSPPCP

SEQ ID NO: 843 - protein, 15 aa, Artificial Sequence
  Linker 151
EPTSCDKTHTCPPSP

SEQ ID NO: 844 - protein, 15 aa, Artificial Sequence
  Linker 152
EPTSSDKTHTSPPCP

SEQ ID NO: 845 - protein, 15 aa, Artificial Sequence
  Linker 153
EPTSSDKTHTCPPSP

SEQ ID NO: 846 - protein, 15 aa, Artificial Sequence
  Linker 154
EPTSCDKTHTSPPSP

SEQ ID NO: 847 - protein, 15 aa, Artificial Sequence
  Linker 155
EPTSCDKTHTCPPCS

SEQ ID NO: 848 - protein, 15 aa, Artificial Sequence
  Linker 156
EPTSSDKTHTCPPCS

SEQ ID NO: 849 - protein, 15 aa, Artificial Sequence
  Linker 157
EPTSCDKTHTSPPCS

SEQ ID NO: 850 - protein, 15 aa, Artificial Sequence
  Linker 158
EPTSCDKTHTCPPSS

SEQ ID NO: 851 - protein, 15 aa, Artificial Sequence
  Linker 159
EPTSSDKTHTSPPCS

SEQ ID NO: 852 - protein, 15 aa, Artificial Sequence
  Linker 160
EPTSSDKTHTCPPSS

SEQ ID NO: 853 - protein, 15 aa, Artificial Sequence
  Linker 161
EPTSCDKTHTSPPSS

SEQ ID NO: 854 - protein, 15 aa, Artificial Sequence
  Linker 162
EPASCDKTHTCPPCP

SEQ ID NO: 855 - protein, 15 aa, Artificial Sequence
  Linker 163
EPASSDKTHTCPPCP

SEQ ID NO: 856 - protein, 15 aa, Artificial Sequence
  Linker 164
EPASCDKTHTSPPCP

SEQ ID NO: 857 - protein, 15 aa, Artificial Sequence
  Linker 165
EPASCDKTHTCPPSP

SEQ ID NO: 858 - protein, 15 aa, Artificial Sequence
  Linker 166
EPASSDKTHTSPPCP

SEQ ID NO: 859 - protein, 15 aa, Artificial Sequence
  Linker 167
EPASSDKTHTCPPSP

SEQ ID NO: 860 - protein, 15 aa, Artificial Sequence
  Linker 168
EPASCDKTHTSPPSP

SEQ ID NO: 861 - protein, 15 aa, Artificial Sequence
  Linker 169
EPASCDKTHTCPPCS

SEQ ID NO: 862 - protein, 15 aa, Artificial Sequence
  Linker 170
EPASSDKTHTCPPCS

SEQ ID NO: 863 - protein, 15 aa, Artificial Sequence
  Linker 171
EPASCDKTHTSPPCS

SEQ ID NO: 864 - protein, 15 aa, Artificial Sequence
  Linker 172
EPASCDKTHTCPPSS

SEQ ID NO: 865 - protein, 15 aa, Artificial Sequence
  Linker 173
EPASSDKTHTSPPCS

SEQ ID NO: 866 - protein, 15 aa, Artificial Sequence
  Linker 174
EPASSDKTHTCPPSS

SEQ ID NO: 867 - protein, 15 aa, Artificial Sequence
  Linker 175
EPASCDKTHTSPPSS

SEQ ID NO: 868 - protein, 14 aa, Artificial Sequence
  Linker 176
EPSCDKTHTCPPCP

SEQ ID NO: 869 - protein, 14 aa, Artificial Sequence
  Linker 177
EPSSDKTHTCPPCP

SEQ ID NO: 870 - protein, 14 aa, Artificial Sequence
  Linker 178
EPSCDKTHTSPPCP

SEQ ID NO: 871 - protein, 14 aa, Artificial Sequence
  Linker 179
EPSCDKTHTCPPSP

SEQ ID NO: 872 - protein, 14 aa, Artificial Sequence
  Linker 180
EPSSDKTHTSPPCP

SEQ ID NO: 873 - protein, 14 aa, Artificial Sequence
  Linker 181
EPSSDKTHTCPPSP

SEQ ID NO: 874 - protein, 14 aa, Artificial Sequence
  Linker 182
EPSCDKTHTSPPSP

SEQ ID NO: 875 - protein, 14 aa, Artificial Sequence
  Linker 183
EPSCDKTHTCPPCS

SEQ ID NO: 876 - protein, 14 aa, Artificial Sequence
  Linker 184
EPSSDKTHTCPPCS

SEQ ID NO: 877 - protein, 14 aa, Artificial Sequence
  Linker 185
EPSCDKTHTSPPCS

SEQ ID NO: 878 - protein, 14 aa, Artificial Sequence
  Linker 186
EPSCDKTHTCPPSS

SEQ ID NO: 879 - protein, 14 aa, Artificial Sequence
  Linker 187
EPSSDKTHTSPPCS

SEQ ID NO: 880 - protein, 14 aa, Artificial Sequence
  Linker 188
EPSSDKTHTCPPSS

SEQ ID NO: 881 - protein, 14 aa, Artificial Sequence
  Linker 189
EPSCDKTHTSPPSS

SEQ ID NO: 882 - protein, 217 aa, Artificial Sequence
  G1 N297A  CH2-CH3 (N297ST - A297ST)
APELLGGPSVFLFPPKPKDTLMISRTPEVTCVVVDVSHEDPEVKFNWYVDGVEVHNAKTKPREEQYASTYRVVSVLTVLHQDWLNGKEYKCKVSNKALPAPIEKTISKAKGQPREPQVYTLPPSRDELTKNQVSLTCLVKGFYPSDIAVEWESNGQPENNYKTTPPVLDSDGSFFLYSKLTVDKSRWQQGNVFSCSVMHEALHNHYTQKSLSLSPGK

SEQ ID NO: 883 - protein, 216 aa, Artificial Sequence
  IgG1 AA N297A CH2CH3 (Ala substitutions at 234, 235, 237 and 297; 236 deleted)
APEAAAPSVFLFPPKPKDTLMISRTPEVTCVVVDVSHEDPEVKFNWYVDGVEVHNAKTKPREEQYASTYRVVSVLTVLHQDWLNGKEYKCKVSNKALPAPIEKTISKAKGQPREPQVYTLPPSRDELTKNQVSLTCLVKGFYPSDIAVEWESNGQPENNYKTTPPVLDSDGSFFLYSKLTVDKSRWQQGNVFSCSVMHEALHNHYTQKSLSLSPGK

SEQ ID NO: 884 - protein, 216 aa, Artificial Sequence
  G2 AA N297A CH2CH3 (Ala substitution at 234, 236 and 297)
APEAAAPSVFLFPPKPKDTLMISRTPEVTCVVVDVSHEDPEVQFNWYVDGMEVHNAKTKPREEQFASTFRVVSVLTVVHQDWLNGKEYKCKVSNKGLPAPIEKTISKTKGQPREPQVYTLPPSREEMTKNQVSLTCLVKGFYPSDIAVEWESNGQPENNYKTTPPMLDSDGSFFLYSKLTVDKSRWQQGNVFSCSVMHEALHNHYTQKSLSLSPGK

SEQ ID NO: 885 - protein, 216 aa, Artificial Sequence
  G4 AA N297A CH2CH3 (Ala substitutions at 234, 235, 237 and 297; 236 deleted)
APEAAAPSVFLFPPKPKDTLMISRTPEVTCVVVDVSQEDPEVQFNWYVDGVEVHNAKTKPREEQFASTYRVVSVLTVLHQDWLNGKEYKCKVSNKGLPSSIEKTISKAKGQPREPQVYTLPPSQEEMTKNQVSLTCLVKGFYPSDIAVEWESNGQPENNYKTTPPVLDSDGSFFLYSRLTVDKSRWQEGNVFSCSVMHEALHNHYTQKSLSLSPGK

SEQ ID NO: 886 - protein, 213 aa, Artificial Sequence
  HM1 (IgM CH3:IgG1 CH3) without C-terminal tail
DQDTAIRVFAIPPSFASIFLTKSTKLTCLVTDLTTYDSVTISWTRQNGEAVKTHTNISESHPNATFSAVGEASICEDDWNSGERFTCTVTHTDLPSPLKQTISRPKGQPREPQVYTLPPSRDELTKNQVSLTCLVKGFYPSDIAVEWESNGQPENNYKTTPPVLDSDGSFFLYSKLTVDKSRWQQGNVFSCSVMHEALHNHYTQKSLSLSPGK

SEQ ID NO: 887 - protein, 217 aa, Artificial Sequence
  Human IgG1 CH2 CH3 Null2
APEAAGAPSVFLFPPKPKDTLMISRTPEVTCVVVDVSHEDPEVKFNWYVDGVEVHNAKTKPREEQYNSTYRVVSVLTVLHQDWLNGKAYACAVSNKALPAPIEKTISKAKGQPREPQVYTLPPSRDELTKNQVSLTCLVKGFYPSDIAVEWESNGQPENNYKTTPPVLDSDGSFFLYSKLTVDKSRWQQGNVFSCSVMHEALHNHYTQKSLSLSPGK

SEQ ID NO: 888 - protein, 216 aa, Artificial Sequence
  Half null CH2-CH3 regions
PDAAGAPSVFIFPPKIKDVLMISLSPMVTCVVVDVSEDDPDVQISWFVNNVEVHTAQTQTHREDYASTLRVVSALPIQHQDWMSGKEFKCKVNNRALPSPIEKTISKPRGPVRAPQVYVLPPPAEEMTKKEFSLTCMITGFLPAEIAVDWTSNGRTEQNYKNTATVLDSDGSYFMYSKLRVQKSTWERGSLFACSVVHEGLHNHLTTKTISRSLGK

SEQ ID NO: 889 - protein, 213 aa, Artificial Sequence
  HM2 (mouse CH3mu-CH3gamma) without C-termial tail
SPSTDILTFTIPPSFADIFLSKSANLTCLVSNLATYETLNISWASQSGEPLETKIKIMESHPNGTFSAKGVASVCVEDWNNRKEFVCTVTHRDLPSPQKKFISKPNGPVRAPQVYVLPPPAEEMTKKEFSLTCMITGFLPAEIAVDWTSNGRTEQNYKNTATVLDSDGSYFMYSKLRVQKSTWERGSLFACSVVHEGLHNHLTTKTISRSLGK
